(19) United States
(12) Patent Application Publication
(10) Pub. No.: US 2010/0199380 A1
(43) Pub. Date: Aug. 5, 2010

(54) PLANTS HAVING ENHANCED YIELD-RELATED TRAITS AND A METHOD FOR MAKING THE SAME

(75) Inventors: Valerie Frankard, Waterloo (BE); Ana Isabel Sanz Molinero, Gentbrugge (BE); Christophe Reuzeau, Tocan Saint Apre (FR)

Correspondence Address: CONNOLLY BOVE LODGE & HUTZ, LLP, P O BOX 2207, WILMINGTON, DE, 19899, US

(73) Assignee: BASF Plant Science GmbH, Ludwigshafen (DE)

(21) Appl. No.: 12/666,317

(22) PCT Filed: Jun. 30, 2008
(86) PCT No.: PCT/EP2008/058370

§ 371 Date: Dec. 23, 2009

Related U.S. Application Data
(60) Provisional application No. 61/057,921, filed on Jun. 2, 2008.

(30) Foreign Application Priority Data
Jun. 29, 2007 (EP) 07111425.0
Jul. 17, 2007 (EP) 07112614.8
Jul. 17, 2007 (EP) 07112616.3
Jul. 18, 2007 (EP) 07112724.5
Jul. 18, 2007 (EP) 07112725.2
Jun. 2, 2008 (EP) 08157433.7

(51) Int. Cl. A01H 1/00; A01H 5/00; C12N 15/74; C12N 5/10

(52) U.S. Cl. 800/278; 800/298; 435/320.1; 435/419

(57) ABSTRACT

The present invention relates generally to the field of molecular biology and concerns a method for enhancing various economically important yield-related traits in plants. More specifically, the present invention concerns a method for enhancing yield-related traits in plants by modulating expression in a plant of a nucleic acid encoding a yield increasing polypeptide. The present invention also concerns plants having modulated expression of a nucleic acid encoding a yield increasing polypeptide, which plants have enhanced yield-related traits relative to control plants.

[0001] The present invention relates generally to the field of molecular biology and concerns a method for enhancing various plant yield-related traits by modulating expression in a plant of a nucleic acid encoding a yield increasing polypeptide selected from the group consisting of:
[0002] bHLH6-like (basic Helix-Loop-Helix 6-like) protein,
[0003] a GRP (Growth Regulating Protein), wherein said GRP is selected from the group consisting of:
   [0004] an RrmJ/FtsJ ribosomal RNA methyltransferase polypeptide (RrmJ/FtsJ polypeptide)
   [0005] a basic-helix-loop-helix 4 (bHLH4) polypeptide
   [0006] an isopentenyl transferase (IPT) polypeptide
[0007] an STO (Salt Tolerance) protein
[0008] a UGE (UDP-Glucose 4-Epimerase or UDP-Gal 4-Epimerase) polypeptide.

[0009] The present invention also concerns plants having modulated expression of a nucleic acid encoding a yield increasing polypeptide, which plants have enhanced yield-related relative to corresponding wild type plants or other control plants. The invention also provides constructs useful in the methods of the invention.

[0010] The ever-increasing world population and the dwindling supply of arable land available for agriculture fuels research towards increasing the efficiency of agriculture. Conventional means for crop and horticultural improvements utilise selective breeding techniques to identify plants having desirable characteristics. However, such selective breeding techniques have several drawbacks, namely that these techniques are typically labour intensive and result in plants that often contain heterogeneous genetic components that may not always result in the desirable trait being passed on from parent plants. Advances in molecular biology have allowed mankind to modify the germplasm of animals and plants. Genetic engineering of plants entails the isolation and manipulation of genetic material (typically in the form of DNA or RNA) and the subsequent introduction of that genetic material into a plant. Such technology has the capacity to deliver crops or plants having various improved economic, agronomic or horticultural traits.

[0011] A trait of particular economic interest is increased yield. Yield is normally defined as the measurable produce of economic value from a crop. This may be defined in terms of quantity and/or quality. Yield is directly dependent on several factors, for example, the number and size of the organs, plant architecture (for example, the number of branches), seed production, leaf senescence and more. Root development, nutrient uptake, stress tolerance and early vigour may also be important factors in determining yield. Optimizing the above-mentioned factors may therefore contribute to increasing crop yield.

[0012] Seed yield is a particularly important trait, since the seeds of many plants are important for human and animal nutrition. Crops such as corn, rice, wheat, canola and soybean account for over half the total human caloric intake, whether through direct consumption of the seeds themselves or through consumption of meat products raised on processed seeds. They are also a source of sugars, oils and many kinds of metabolites used in industrial processes. Seeds contain an embryo (the source of new shoots and roots) and an endosperm (the source of nutrients for embryo growth during germination and during early growth of seedlings). The development of a seed involves many genes, and requires the transfer of metabolites from the roots, leaves and stems into the growing seed. The endosperm, in particular, assimilates the metabolic precursors of carbohydrates, oils and proteins and synthesizes them into storage macromolecules to fill out the grain.

[0013] A further interesting trait is the flowering time of a plant. The life span of a plant can be divided in phases such as germination, vegetative growth, reproductive growth and senescence. The flowering time is the time elapsed between sowing and start of reproductive growth. It is a crucial moment in the life of a plant that determines the transition from vegetative to reproductive growth, which in some plants coincides with the start of senescence. In many plants, this is the point in time at which the shoot apical meristem stops making leaves and starts making flowers which has a great impact on morphogenesis affecting, for example, the number of organs formed and the overall size and shape of the plant. The flowering time also impacts other yield-related traits in plants. Typically an early flowering variety shows less branching or tillering and therefore is less bushy. Such traits may be advantageous to the farmer to, for example, simplify crop management. On the other hand, delayed flowering may result in plants with more vegetative organs, for example more leaves which is a desirable trait in many crops, particularly in crops where the vegetative organs are harvested, such as lettuce. The relative duration of vegetative and reproductive phase of a plant directly affects its seed yield. In some plants, control of flowering time is a mechanism used to avoid negative impact of stresses such as drought. Flowering time may also affect quality traits of crops, for example herbage quality in forage crops, where delay in flowering may result in higher digestibility. The flowering time affects the length of the cultivation season. Modification of flowering time of a crop may result in the possibility to extend the geographic area of cultivation and therefore increase the cultivated acreage. It may also result in plants being more amenable to agriculture in a given environment, for example early flowering may allow late planting in areas where crop establishment may be negatively affected by low temperatures or may allow early harvest to avoid biotic and abiotic pressure at the end of the season, resulting therefore in an increase in the yield of the crop. Therefore, the ability to control flowering time is an important factor with many industrial applications in the field of agriculture.

[0014] Another important trait for many crops is early vigour. Improving early vigour is an important objective of modern rice breeding programs in both temperate and tropical rice cultivars. Long roots are important for proper soil anchorage in water-seeded rice. Where rice is sown directly into flooded fields, and where plants must emerge rapidly through water, longer shoots are associated with vigour. Where drill-seeding is practiced, longer mesocotyls and coleoptiles are important for good seedling emergence. The ability to engineer early vigour into plants would be of great importance in agriculture. For example, poor early vigour has been a limitation to the introduction of maize (Zea mays L.) hybrids based on Corn Belt germplasm in the European Atlantic.

[0015] A further important trait is that of improved abiotic stress tolerance. Abiotic stress is a primary cause of crop loss worldwide, reducing average yields for most major crop plants by more than 50% (Wang et al., Planta (2003) 218: 1-14). Abiotic stresses may be caused by drought, salinity, extremes of temperature, chemical toxicity, from 59348: excess or lack of nutrients (macroelements and/or microelemtens), radiation and oxidative stress. The ability to improve plant tolerance to abiotic stress would be of great economic advantage to farmers worldwide and would allow for the cultivation of crops during adverse conditions and in territories where cultivation of crops may not otherwise be possible.

[0016] Crop yield may therefore be increased by optimising one of the above-mentioned factors.

[0017] Depending on the end use, the modification of certain yield traits may be favoured over others. For example for applications such as forage or wood production, or bio-fuel resource, an increase in the vegetative parts of a plant may be desirable, and for applications such as flour, starch or oil production, an increase in seed parameters may be particularly desirable. Even amongst the seed parameters, some may be favoured over others, depending on the application. Various mechanisms may contribute to increasing seed yield, whether that is in the form of increased seed size or increased seed number.

[0018] One approach to increasing yield (seed yield and/or biomass) in plants may be through modification of the inherent growth mechanisms of a plant, such as the cell cycle or various signalling pathways involved in plant growth or in defense mechanisms.

[0019] It has now been found that various yield-related traits may be enhanced in plants by modulating expression in a plant of a nucleic acid encoding a

yield increasing polypeptide selected from the group consisting of:
[0020] bHLH6-like (basic Helix-Loop-Helix 6-like) protein,
[0021] a GRP (Growth Regulating Protein), wherein said GRP is selected from the group consisting of:
   [0022] an RrmJ/FtsJ ribosomal RNA methyltransferase polypeptide (RrmJ/FtsJ polypeptide)
   [0023] a basic-helix-loop-helix 4 (bHLH4) polypeptide
   [0024] an isopentenyl transferase (IPT) polypeptide
[0025] an STO (Salt Tolerance) protein
[0026] a UGE (UDP-Glucose 4-Epimerase or UDP-Gal 4-Epimerase) polypeptide.

### BACKGROUND

[0027] bHLH6-Like (Basic Helix-Loop-Helix 6-Like) Protein

[0028] Transcription factors are usually defined as proteins that show sequence-specific DNA binding and that are capable of activating and/or repressing transcription. The basic Helix-Loop-Helix transcription factor family is one of the largest families of transcription factors that have been characterised in Arabidopsis thaliana (Toledo-Ortiz et al., Plant Cell 15, 1749-1770, 2003; Bailey et al., Plant Cell 15, 2497-2501, 2003) and in rice (Li et al Plant Physiol. 141, 1167-1184, 2006). The distinguishing characteristic of the bHLH transcription factor family is the presence of a bipartite domain consisting of approximately 60 amino acids. This bipartite domain is comprised of a DNA-binding basic region, which binds to a consensus hexanucleotide E-box and two α-helices separated by a variable loop region, located C-terminally of the basic domain. The two α-helices promote dimerisation, allowing the formation of homo- and heterodimers between different family members. While the bHLH domain is evolutionarily conserved, there is little sequence similarity between clades beyond the domain. Li et al. (2006) classify the rice and Arabidopsis bHLH transcription factors into 22 subfamilies, based on the sequence of the bHLH domains.

[0029] AtbHLH6 (AtMYC2) is a 68 kDa MYC-related transcriptional activator with a bHLH type DNA-binding domain (Abe et al, Plant Cell 9, 1859-1868, 1997). It is induced by dehydration stress and upon treatment with abscisic acid (ABA). AtMYC2 recognises a MYC recognition site in the promoter of the rd22 gene, an ABA responsive protein without an ABRE-element in the promoter. Plants overexpressing AtMYC2 have a higher sensitivity to ABA, with enhanced ABA-induced gene expression, whereas an insertion mutant showed the opposite (reduced ABA sensitivity and decreased ABA-induced gene expression); furthermore AtMYC2 overexpressing plants were more resistant to osmotic stress (Abe et al., Plant Cell 15, 63-78, 2003). Plants overexpressing AtMYC2 reportedly did not show morphological changes compared to wild type plants and also the cell shape in leaves was not affected. Furthermore, AtMYC2 was shown to be involved in pathogen and wound responses; in tryptophan and tryptophan-derived secondary metabolism and in tolerance to methyl viologen (Paraquat) (Dombrecht et al., Plant Cell 19, 2225-2245, 2007).

### STO (Salt Tolerance) Protein

[0030] STO protein, Salt Tolerance Protein, was first identified from Arabidopsis thaliana in a screen for genes suppressing defective salt response in a calcienurin mutant in yeast (Lippuner et al. 1996). Methods for conferring salt tolerance in a plant by expressing the Arabidopsis STO have been previously disclosed (U.S. Pat. No. 5,859,337; Nagaoka and Takano 2003, J. Exp. Bot. 54, 391-396).

[0031] Structurally STO is characterized by the presence of a well-known domain called the B-box domain in which the structure CX2CX16CX2C is conserved. The B-box domain is a promiscuous domain present in proteins of archeobacterial, prokaryotic and eukaryotic origin. It is found essentially in transcription factors, ribonucleoproteins and protooncoproteins. The B-box domain in STO is structurally similar to that found in the Arabidopsis thaliana protein CONSTANS, a transcription factor involved in repression of flowering time. However STO and CONSTANs belong to different protein families, with CONSTANS being characterized by the presence of a plant-specific conserved domain, the so called the CCT box in addition to the B-box, while in the STO family of proteins only the B-box is present (Griffiths et al. 2003, Plant Phys, 131, 1855-1867; Lagercrants et al. 2000 Mol. Biol. Evol. 17, 1499-1507).

[0032] The biological function of STO in Arabidopsis has been further investigated using gain and loss of function mutants (Indorf, et al. 2007, Plant J. 51(4):563-74.). Data reported from those studies suggested a role for STO in light signalling where it was mentioned that STO could act as a negative regulator in phytochrome and blue light signalling. These studies were directed to understanding, the role of STO in the salt stress and light response.

### UGE (UDP-Glucose 4-Epimerase or UDP-Gal 4-Epimerase) Polypeptide

[0033] The biosynthesis of carbohydrates in plants requires specific glycosyl-transferases that act on activated sugars, typically uridine (UDP), adenosine or guanosine diphosphate hexoses and pentoses. Nucleotide sugars are modified at their glycosyl moities by nucleotide sugar interconversion enzymes to generate different sugars that are intermediates in the uptake of the free sugars released from the breakdown of nutritional or storage carbohydrates and other sources. One of the best-characterized nucleotide sugar interconversion enzymes is UGE (EC.5.1.3.2 according to the IUBMB—International Union of Biochemistry and Molecular Biology—Enzyme Nomenclature).

[0034] UGE, UDP-Glucose 4-Epimerase or UDP-Gal 4-Epimerase (EC.5.1.3.2) catalyses the interconversion of UDP-glucose and UDP-galactose. Varying concentrations of the cofactor NAD+/NADH (Nicotinamide Adenine Dinucleotide-oxidized/reduced-), can result in differential stimulation of the reaction. X-ray crystallography and other studies suggest that UGEs are dimeric, although active monomers and higher polymers have also been reported under certain experimental conditions (Thoden et al. 2005 J. Biol. Chem 280, 21900-21907).

[0035] UGE is essential for de novo biosynthesis of UDP-Gal, a precursor for the biosynthesis of numerous different carbohydrates, glycolipids and glycosides. UGE is also required for the catabolic uptake of galactose into the central metabolism, and therefore UGE deficiency exarcerbates galactose toxicity in plants (Dormann and Benning, 1998; Plant J. 13, 641-652) and in yeast and it also leads to different forms of human galactosemia.

[0036] UGE enzymes are encoded in the genome of microorganisms as well as of higher organisms. In the model plant Arabidopsis thaliana five different paralogous genes enconding UGE isoforms have been identified. The rice and poplar genomes encode at least seven predicted UGE isoforms.

[0037] The enzymatic properties and genetic role of UGE isoforms has been addressed in Arabidopsis thaliana in biochemical studies as well as by characterization of gain and loss of function mutants. All five Arabidopsis UGEs are enzymatically active in similar ranges of temperature (30-40 C) and PH (PH7-PH9). Homo and heterodimers can be formed between UGE isoforms. The five isoforms are functional in vivo and can complement the loss of function in the yeast GAL10 mutant lacking UGE function. The latter reflects the functional conservation of UGE enzymatic activities between UGEs of microorganisms and higher plants (Barber et al. 2006; JBC 281, 17276-17285). In Arabidopsis the 5 paralogous genes encoding UGEs are expressed preferentially in the roots. Mutations or loss of UGE function typically resulted in general growth defects of vegetative organs and flowers were smaller and abnormally shaped. Surprisingly the floral number and position was not altered, though sterility was reported (Rosti et al. 2007; The Plant Cell 19, 1565-1579). In accordance with UGE activity the cell wall galactose content in these mutants was altered. U.S. Pat. No. 6,992,236 discloses plant-derived UGE genes and teaches methods to express them in plants to allow modification of carbohydrate metabolism in plants.

### SUMMARY

[0038] Surprisingly, it has now been found that modulating expression of a nucleic acid encoding a yield increasing polypeptide selected from the group consisting of:
[0039] bHLH6-like (basic Helix-Loop-Helix 6-like) protein,
[0040] a GRP (Growth Regulating Protein), wherein said GRP is selected from the group consisting of:
   [0041] an RrmJ/FtsJ ribosomal RNA methyltransferase polypeptide (RrmJ/FtsJ polypeptide)
   [0042] a basic-helix-loop-helix 4 (bHLH4) polypeptide
   [0043] an isopentenyl transferase (IPT) polypeptide
[0044] an STO (Salt Tolerance) protein
[0045] a UGE (UDP-Glucose 4-Epimerase or UDP-Gal 4-Epimerase) polypeptide gives plants having enhanced yield-related traits relative to control plants.

[0046] According one embodiment, there is provided a method for enhancing yield related traits of a plant relative to control plants, comprising modulating expression of a nucleic acid encoding a bHLH6-like polypeptide in a plant. The enhanced yield related traits comprised increased increased yield and increased emergence vigour.

[0047] According one embodiment, there is provided a method for enhancing yield-related traits of a plant relative to control plants, comprising modulating expression of a nucleic acid sequence encoding a GRP polypeptide in a plant, wherein said GRP polypeptide is an RrmJ/FtsJ ribosomal RNA methyltransferase polypeptide (RrmJ/FtsJ polypeptide). The enhanced yield-related traits comprise increased seed yield, increased number of filled seeds, increased seed fill rate, and increased harvest index.

[0048] According to one embodiment, there is provided a method for enhancing yield-related traits of a plant relative to control plants, comprising modulating expression (preferably, increasing) of a nucleic acid sequence encoding a GRP polypeptide in a plant, wherein said GRP polypeptide is a basic-helix-loop-helix 4 (bHLH4) polypeptide. The enhanced yield-related traits are preferably enhanced seed yield-related traits, comprising one or more of: increased early vigour, increased greenness index, increased total seed yield per plant, increased number of filled seeds, increased seed fill rate, increased, and increased harvest index.

[0049] According to one embodiment, there is provided a method for enhancing yield-related traits of a plant relative to control plants, comprising modulating expression (preferably, increasing) of a nucleic acid sequence encoding a GRP polypeptide in a plant, wherein said GRP polypeptide is an isopentenyl transferase (IPT) polypeptide. The enhanced yield-related traits are one or more of: increased total seed yield per plant, increased number of filled seeds, increased total number of seeds, and increased harvest index.

[0050] According one embodiment, there is provided a method for enhancing yield-related traits plants, particularly increasing early vigour and altering flowering time, particularly shortening flowering time relative to control plants, comprising modulating expression of a nucleic acid encoding an STO polypeptide in a plant.

[0051] According to one embodiment, there is provided a method for enhancing yield related traits of a plant relative to control plants, in particular increased yield, comprising modulating expression of a nucleic acid encoding a UGE polypeptide in a plant.

### DEFINITIONS

[0052] The terms improving and/or enhancing and/or improved and/or enhanced plant yield-related traits are used herein encompass improving and/or enhancing and/or improved and/or enhanced plant growth characteristics.

### Polypeptide(s)/Protein(s)

[0053] The terms “polypeptide” and “protein” are used interchangeably herein and refer to amino acids in a polymeric form of any length, linked together by peptide bonds.

### Polynucleotide(S)/Nucleic Acid(S)/Nucleic Acid Sequence(S)/Nucleotide Sequence(S)

[0054] The terms “polynucleotide(s)”, “nucleic acid sequence(s)”, “nucleotide sequence(s)”, “nucleic acid(s)”, “nucleic acid molecule” are used interchangeably herein and refer to nucleotides, either ribonucleotides or deoxyribonucleotides or a combination of both, in a polymeric unbranched form of any length.

### Control Plant(s)

[0055] The choice of suitable control plants is a routine part of an experimental setup and may include corresponding wild type plants or corresponding plants without the gene of interest. The control plant is typically of the same plant species or even of the same variety as the plant to be assessed. The control plant may also be a nullizygote of the plant to be assessed.

[0056] Nullizygotes are individuals missing the transgene by segregation. A “control plant” as used herein refers not only to whole plants, but also to plant parts, including seeds and seed parts.

### Homoloque(s)

[0057] “Homologues” of a protein encompass peptides, oligopeptides, polypeptides, proteins and enzymes having amino acid substitutions, deletions and/or insertions relative to the unmodified protein in question and having similar biological and functional activity as the unmodified protein from which they are derived.

[0058] A deletion refers to removal of one or more amino acids from a protein.

[0059] An insertion refers to one or more amino acid residues being introduced into a predetermined site in a protein. Insertions may comprise N-terminal and/or C-terminal fusions as well as intra-sequence insertions of single or multiple amino acids. Generally, insertions within the amino acid sequence will be smaller than N- or C-terminal fusions, of the order of about 1 to 10 residues. Examples of N- or C-terminal fusion proteins or peptides include the binding domain or activation domain of a transcriptional activator as used in the yeast two-hybrid system, phage coat proteins, (histidine)-6-tag, glutathione S-transferase-tag, protein A, maltose-binding protein, dihydrofolate reductase, Tag•100 epitope, c-myc epitope, FLAG®-epitope, lacZ, CMP (calmodulin-binding peptide), HA epitope, protein C epitope and VSV epitope.

[0060] A substitution refers to replacement of amino acids of the protein with other amino acids having similar properties (such as similar hydrophobicity, hydrophilicity, antigenicity, propensity to form or break α-helical structures or β-sheet structures). Amino acid substitutions are typically of single residues, but may be clustered depending upon functional constraints placed upon the polypeptide; insertions will usually be of the order of about 1 to 10 amino acid residues. The amino acid substitutions are preferably conservative amino acid substitutions. Conservative substitution tables are well known in the art (see for example Creighton (1984) Proteins. W.H. Freeman and Company (Eds) and Table 1 below).

TABLE 1
Examples of conserved amino acid substitutions

| | Conservative |
|---|---|
| Residue | Substitutions |
| Ala | Ser |
| Arg | Lys |
| Asn | Gln; His |
| Asp | Glu |
| Gln | Asn |
| Cys | Ser |
| Glu | Asp |
| Gly | Pro |
| His | Asn; Gln |
| Ile | Leu, Val |
| Leu | Ile; Val |
| Lys | Arg; Gln |
| Met | Leu; Ile |
| Phe | Met; Leu; Tyr |
| Ser | Thr; Gly |
| Thr | Ser; Val |
| Trp | Tyr |
| Tyr | Trp; Phe |
| Val | Ile; Leu |

[0061] Amino acid substitutions, deletions and/or insertions may readily be made using peptide synthetic techniques well known in the art, such as solid phase peptide synthesis and the like, or by recombinant DNA manipulation. Methods for the manipulation of DNA sequences to produce substitution, insertion or deletion variants of a protein are well known in the art. For example, techniques for making substitution mutations at predetermined sites in DNA are well known to those skilled in the art and include M13 mutagenesis, T7-Gen in vitro mutagenesis (USB, Cleveland, Ohio), QuickChange Site Directed mutagenesis (Stratagene, San Diego, Calif.), PCR-mediated site-directed mutagenesis or other site-directed mutagenesis protocols.

### Derivatives

[0062] “Derivatives” include peptides, oligopeptides, polypeptides which may, compared to the amino acid sequence of the naturally-occurring form of the protein, such as the protein of interest, comprise substitutions of amino acids with non-naturally occurring amino acid residues, or additions of non-naturally occurring amino acid residues. “Derivatives” of a protein also encompass peptides, oligopeptides, polypeptides which comprise naturally occurring altered (glycosylated, acylated, prenylated, phosphorylated, myristoylated, sulphated etc.) or non-naturally altered amino acid residues compared to the amino acid sequence of a naturally-occurring form of the polypeptide. A derivative may also comprise one or more non-amino acid substituents or additions compared to the amino acid sequence from which it is derived, for example a reporter molecule or other ligand, covalently or non-covalently bound to the amino acid sequence, such as a reporter molecule which is bound to facilitate its detection, and non-naturally occurring amino acid residues relative to the amino acid sequence of a naturally-occurring protein. Furthermore, “derivatives” also include fusions of the naturally-occurring form of the protein with tagging peptides such as FLAG, HIS6 or thioredoxin (for a review of tagging peptides, see Terpe, Appl. Microbiol. Biotechnol. 60, 523-533, 2003).

### Ortholoque(s)/Paraloque(s)

[0063] Orthologues and paralogues encompass evolutionary concepts used to describe the ancestral relationships of genes. Paralogues are genes within the same species that have originated through duplication of an ancestral gene; orthologues are genes from different organisms that have originated through speciation, and are also derived from a common ancestral gene.

### Domain

[0064] The term “domain” refers to a set of amino acids conserved at specific positions along an alignment of sequences of evolutionarily related proteins. While amino acids at other positions can vary between homologues, amino acids that are highly conserved at specific positions indicate amino acids that are likely essential in the structure, stability or function of a protein. Identified by their high degree of conservation in aligned sequences of a family of protein homologues, they can be used as identifiers to determine if any polypeptide in question belongs to a previously identified polypeptide family.

### Motif/Consensus Sequence/Signature

[0065] The term “motif” or “consensus sequence” or “signature” refers to a short conserved region in the sequence of evolutionarily related proteins. Motifs are frequently highly conserved parts of domains, but may also include only part of the domain, or be located outside of conserved domain (if all of the amino acids of the motif fall outside of a defined domain).

### Hybridisation

[0066] The term “hybridisation” as defined herein is a process wherein substantially homologous complementary nucleotide sequences anneal to each other. The hybridisation process can occur entirely in solution, i.e. both complementary nucleic acids are in solution. The hybridisation process can also occur with one of the complementary nucleic acids immobilised to a matrix such as magnetic beads, Sepharose beads or any other resin. The hybridisation process can furthermore occur with one of the complementary nucleic acids immobilised to a solid support such as a nitro-cellulose or nylon membrane or immobilised by e.g. photolithography to, for example, a siliceous glass support (the latter known as nucleic acid arrays or microarrays or as nucleic acid chips). In order to allow hybridisation to occur, the nucleic acid molecules are generally thermally or chemically denatured to melt a double strand into two single strands and/or to remove hairpins or other secondary structures from single stranded nucleic acids.

[0067] The term “stringency” refers to the conditions under which a hybridisation takes place. The stringency of hybridisation is influenced by conditions such as temperature, salt concentration, ionic strength and hybridisation buffer composition. Generally, low stringency conditions are selected to be about 30° C. lower than the thermal melting point (Tₘ) for the specific sequence at a defined ionic strength and pH. Medium stringency conditions are when the temperature is 20° C. below Tₘ, and high stringency conditions are when the temperature is 10° C. below Tₘ. High stringency hybridisation conditions are typically used for isolating hybridising sequences that have high sequence similarity to the target nucleic acid sequence. However, nucleic acids may deviate in sequence and still encode a substantially identical polypeptide, due to the degeneracy of the genetic code. Therefore medium stringency hybridisation conditions may sometimes be needed to identify such nucleic acid molecules.

[0068] The Tm is the temperature under defined ionic strength and pH, at which 50% of the target sequence hybridises to a perfectly matched probe. The Tₘ is dependent upon the solution conditions and the base composition and length of the probe. For example, longer sequences hybridise specifically at higher temperatures. The maximum rate of hybridisation is obtained from about 16° C. up to 32° C. below Tₘ. The presence of monovalent cations in the hybridisation solution reduce the electrostatic repulsion between the two nucleic acid strands thereby promoting hybrid formation; this effect is visible for sodium concentrations of up to 0.4M (for higher concentrations, this effect may be ignored). Formamide reduces the melting temperature of DNA-DNA and DNA-RNA duplexes with 0.6 to 0.7° C. for each percent formamide, and addition of 50% formamide allows hybridisation to be performed at 30 to 45° C., though the rate of hybridisation will be lowered. Base pair mismatches reduce the hybridisation rate and the thermal stability of the duplexes. On average and for large probes, the Tm decreases about 1° C. per % base mismatch. The Tm may be calculated using the following equations, depending on the types of hybrids:
[0069] 1) DNA-DNA hybrids (Meinkoth and Wahl, Anal. Biochem., 138: 267-284, 1984):

Tₘ=81.5° C.+16.6×log₁₀[Na⁺]^{a}+0.41×%[G/C^{b}]−500×[L^{c}]⁻¹−0.61×% formamide

2) DNA-RNA or RNA-RNA hybrids:

Tm=79.8+18.5(log₁₀[Na⁺]^{a})+0.58 (% G/C^{b})+11.8(% G/C^{b})²−820/L^{c}

3) oligo-DNA or oligo-RNA^{d} hybrids:

For <20 nucleotides: Tₘ=2(lₙ)

For 20-35 nucleotides: Tₘ=22+1.46(lₙ)

^{a} or for other monovalent cation, but only accurate in the 0.01-0.4 M range.
^{b} only accurate for % GC in the 30% to 75% range.
^{c} L=length of duplex in base pairs.
^{d} oligo, oligonucleotide; lₙ,=effective length of primer=2×(no. of G/C)+(no. of A/T).

[0070] Non-specific binding may be controlled using any one of a number of known techniques such as, for example, blocking the membrane with protein containing solutions, additions of heterologous RNA, DNA, and SDS to the hybridisation buffer, and treatment with Rnase. For non-homologous probes, a series of hybridizations may be performed by varying one of (i) progressively lowering the annealing temperature (for example from 68° C. to 42° C.) or (ii) progressively lowering the formamide concentration (for example from 50% to 0%). The skilled artisan is aware of various parameters which may be altered during hybridisation and which will either maintain or change the stringency conditions.

[0071] Besides the hybridisation conditions, specificity of hybridisation typically also depends on the function of post-hybridisation washes. To remove background resulting from non-specific hybridisation, samples are washed with dilute salt solutions. Critical factors of such washes include the ionic strength and temperature of the final wash solution: the lower the salt concentration and the higher the wash temperature, the higher the stringency of the wash. Wash conditions are typically performed at or below hybridisation stringency. A positive hybridisation gives a signal that is at least twice of that of the background. Generally, suitable stringent conditions for nucleic acid hybridisation assays or gene amplification detection procedures are as set forth above. More or less stringent conditions may also be selected. The skilled artisan is aware of various parameters which may be altered during washing and which will either maintain or change the stringency conditions.

[0072] For example, typical high stringency hybridisation conditions for DNA hybrids longer than 50 nucleotides encompass hybridisation at 65° C. in 1×SSC or at 42° C. in 1×SSC and 50% formamide, followed by washing at 65° C. in 0.3×SSC. Examples of medium stringency hybridisation conditions for DNA hybrids longer than 50 nucleotides encompass hybridisation at 50° C. in 4×SSC or at 40° C. in 6×SSC and 50% formamide, followed by washing at 50° C. in 2×SSC. The length of the hybrid is the anticipated length for the hybridising nucleic acid. When nucleic acids of known sequence are hybridised, the hybrid length may be determined by aligning the sequences and identifying the conserved regions described herein. 1×SSC is 0.15M NaCl and 15 mM sodium citrate; the hybridisation solution and wash solutions may additionally include 5×Denhardt's reagent, 0.5-1.0% SDS, 100 μg/ml denatured, fragmented salmon sperm DNA, 0.5% sodium pyrophosphate.

[0073] For the purposes of defining the level of stringency, reference can be made to Sambrook et al. (2001) Molecular Cloning: a laboratory manual, 3^{rd} Edition, Cold Spring Harbor Laboratory Press, CSH, New York or to Current Protocols in Molecular Biology, John Wiley & Sons, N.Y. (1989 and yearly updates).

### Splice Variant

[0074] The term “splice variant” as used herein encompasses variants of a nucleic acid sequence in which selected introns and/or exons have been excised, replaced, displaced or added, or in which introns have been shortened or lengthened. Such variants will be ones in which the biological activity of the protein is substantially retained; this may be achieved by selectively retaining functional segments of the protein. Such splice variants may be found in nature or may be manmade. Methods for predicting and isolating such splice variants are well known in the art (see for example Foissac and Schiex (2005) BMC Bioinformatics 6: 25).

### Allelic Variant

[0075] Alleles or allelic variants are alternative forms of a given gene, located at the same chromosomal position. Allelic variants encompass Single Nucleotide Polymorphisms (SNPs), as well as Small Insertion/Deletion Polymorphisms (INDELs). The size of INDELs is usually less than 100 bp. SNPs and INDELs form the largest set of sequence variants in naturally occurring polymorphic strains of most organisms.

### Gene Shuffling/Directed Evolution

[0076] Gene shuffling or directed evolution consists of iterations of DNA shuffling followed by appropriate screening and/or selection to generate variants of nucleic acids or portions thereof encoding proteins having a modified biological activity (Castle et al., (2004) Science 304(5674): 1151-4; U.S. Pat. Nos. 5,811,238 and 6,395,547).

### Regulatory Element/Control Sequence/Promoter

[0077] The terms “regulatory element”, “control sequence” and “promoter” are all used interchangeably herein and are to be taken in a broad context to refer to regulatory nucleic acid sequences capable of effecting expression of the sequences to which they are ligated. The term “promoter” typically refers to a nucleic acid control sequence located upstream from the transcriptional start of a gene and which is involved in recognising and binding of RNA polymerase and other proteins, thereby directing transcription of an operably linked nucleic acid. Encompassed by the aforementioned terms are transcriptional regulatory sequences derived from a classical eukaryotic genomic gene (including the TATA box which is required for accurate transcription initiation, with or without a CCAAT box sequence) and additional regulatory elements (i.e. upstream activating sequences, enhancers and silencers) which alter gene expression in response to developmental and/or external stimuli, or in a tissue-specific manner. Also included within the term is a transcriptional regulatory sequence of a classical prokaryotic gene, in which case it may include a −35 box sequence and/or −10 box transcriptional regulatory sequences. The term “regulatory element” also encompasses a synthetic fusion molecule or derivative that confers, activates or enhances expression of a nucleic acid molecule in a cell, tissue or organ.

[0078] A “plant promoter” comprises regulatory elements, which mediate the expression of a coding sequence segment in plant cells. Accordingly, a plant promoter need not be of plant origin, but may originate from viruses or micro-organisms, for example from viruses which attack plant cells. The “plant promoter” can also originate from a plant cell, e.g. from the plant which is transformed with the nucleic acid sequence to be expressed in the inventive process and described herein. This also applies to other “plant” regulatory signals, such as “plant” terminators. The promoters upstream of the nucleotide sequences useful in the methods of the present invention can be modified by one or more nucleotide substitution(s), insertion(s) and/or deletion(s) without interfering with the functionality or activity of either the promoters, the open reading frame (ORF) or the 3′-regulatory region such as terminators or other 3′ regulatory regions which are located away from the ORF. It is furthermore possible that the activity of the promoters is increased by modification of their sequence, or that they are replaced completely by more active promoters, even promoters from heterologous organisms. For expression in plants, the nucleic acid molecule must, as described above, be linked operably to or comprise a suitable promoter which expresses the gene at the right point in time and with the required spatial expression pattern.

[0079] For the identification of functionally equivalent promoters, the promoter strength and/or expression pattern of a candidate promoter may be analysed for example by operably linking the promoter to a reporter gene and assaying the expression level and pattern of the reporter gene in various tissues of the plant. Suitable well-known reporter genes include for example beta-glucuronidase or beta-galactosidase. The promoter activity is assayed by measuring the enzymatic activity of the beta-glucuronidase or beta-galactosidase. The promoter strength and/or expression pattern may then be compared to that of a reference promoter (such as the one used in the methods of the present invention). Alternatively, promoter strength may be assayed by quantifying mRNA levels or by comparing mRNA levels of the nucleic acid used in the methods of the present invention, with mRNA levels of housekeeping genes such as 18S rRNA, using methods known in the art, such as Northern blotting with densitometric analysis of autoradiograms, quantitative real-time PCR or RT-PCR (Heid et al., 1996 Genome Methods 6: 986-994). Generally by “weak promoter” is intended a promoter that drives expression of a coding sequence at a low level. By “low level” is intended at levels of about 1/10,000 transcripts to about 1/100,000 transcripts, to about 1/500,000 transcripts per cell. Conversely, a “strong promoter” drives expression of a coding sequence at high level, or at about 1/10 transcripts to about 1/100 transcripts to about 1/1000 transcripts per cell. An example of a strong promoter is the CaMV 35S promoter.

### Operably Linked

[0080] The term “operably linked” as used herein refers to a functional linkage between the promoter sequence and the gene of interest, such that the promoter sequence is able to initiate transcription of the gene of interest.

### Constitutive Promoter

[0081] A “constitutive promoter” refers to a promoter that is transcriptionally active during most, but not necessarily all, phases of growth and development and under most environmental conditions, in at least one cell, tissue or organ. Table 2a below gives examples of constitutive promoters.

TABLE 2a
Examples of constitutive promoters

| Gene Source | Reference |
|---|---|
| Actin | McElroy et al, Plant Cell, 2: 163-171, 1990 |
| HMGP | WO 2004/070039 |
| CAMV 35S | Odell et al, Nature, 313: 810-812, 1985 |
| CaMV 19S | Nilsson et al., Physiol. Plant. 100: 456-462, 1997 |
| GOS2 | de Pater et al, Plant J Nov; 2(6): 837-44, 1992, WO |
| | 2004/065596 |
| Ubiquitin | Christensen et al, Plant Mol. Biol. 18: 675-689, 1992 |
| Rice cyclophilin | Buchholz et al, Plant Mol Biol. 25(5): 837-43, 1994 |
| Maize H3 histone | Lepetit et al, Mol. Gen. Genet. 231: 276-285, 1992 |
| Alfalfa H3 | Wu et al. Plant Mol. Biol. 11: 641-649, 1988 |
| histone | |
| Actin 2 | An et al, Plant J. 10(1); 107-121, 1996 |
| 34S FMV | Sanger et al., Plant. Mol. Biol., 14, 1990: 433-443 |
| Rubisco | U.S. Pat. No. 4,962,028 |
| small subunit | |
| OCS | Leisner (1988) Proc Natl Acad Sci USA 85(5): 2553 |
| SAD1 | Jain et al., Crop Science, 39 (6), 1999: 1696 |
| SAD2 | Jain et al., Crop Science, 39 (6), 1999: 1696 |
| nos | Shaw et al. (1984) Nucleic Acids Res. 12(20): |
| | 7831-7846 |
| V-ATPase | WO 01/14572 |
| Super promoter | WO 95/14098 |
| G-box proteins | WO 94/12015 |

### Ubiquitous Promoter

[0082] A ubiquitous promoter is active in substantially all tissues or cells of an organism.

### Developmentally-Regulated Promoter

[0083] A developmentally-regulated promoter is active during certain developmental stages or in parts of the plant that undergo developmental changes.

### Inducible Promoter

[0084] An inducible promoter has induced or increased transcription initiation in response to a chemical (for a review see Gatz 1997, Annu. Rev. Plant Physiol. Plant Mol. Biol., 48:89-108), environmental or physical stimulus, or may be “stress-inducible”, i.e. activated when a plant is exposed to various stress conditions, or a “pathogen-inducible” i.e. activated when a plant is exposed to exposure to various pathogens.

### Organ-Specific/Tissue-Specific Promoter

[0085] An organ-specific or tissue-specific promoter is one that is capable of preferentially initiating transcription in certain organs or tissues, such as the leaves, roots, seed tissue etc. For example, a “root-specific promoter” is a promoter that is transcriptionally active predominantly in plant roots, substantially to the exclusion of any other parts of a plant, whilst still allowing for any leaky expression in these other plant parts. Promoters able to initiate transcription in certain cells only are referred to herein as “cell-specific”.

[0086] A seed-specific promoter is transcriptionally active predominantly in seed tissue, but not necessarily exclusively in seed tissue (in cases of leaky expression). The seed-specific promoter may be active during seed development and/or during germination. from 59392: Examples of seed-specific promoters are given in Qing Qu and Takaiwa (Plant Biotechnol. J. 2, 113-125, 2004).

### From 59348:

[0087] For example, the seed-specific promoter may drive expression in one or more seed tissues such as endosperm, aleurone, embryo. Examples of seed-specific promoters are shown in Table 2b below. Further examples of seed-specific promoters are given in Qing Qu and Takaiwa (Plant Biotechnol. J. 2, 113-125, 2004), which disclosure is incorporated by reference herein as if fully set forth.

TABLE 2b
Examples of seed-specific promoters

| Gene source | Reference |
|---|---|
| seed-specific genes | Simon et al., Plant Mol. Biol. 5: 191, 1985; |
| | Scofield et al., J. Biol. Chem. 262: 12202, 1987.; |
| | Baszczynski et al., Plant Mol. Biol. 14: 633, 1990. |
| Brazil Nut albumin | Pearson et al., Plant Mol. Biol. 18: 235-245, 1992. |
| Legumin | Ellis et al., Plant Mol. Biol. 10: 203-214, 1988. |
| glutelin (rice) | Takaiwa et al., Mol. Gen. Genet. 208: 15-22, 1986; |
| | Takaiwa et al., FEBS Letts. 221: 43-47, 1987. |
| Zein | Matzke et al Plant Mol Biol, 14(3): 323-32 1990 |
| NapA | Stalberg et al, Planta 199: 515-519, 1996. |
| Wheat LMW and HMW glutenin-1 | Mol Gen Genet 216: 81-90, 1989; NAR 17: 461-2, 1989 |
| Wheat SPA | Albani et al, Plant Cell, 9: 171-184, 1997 |
| Wheat α, β, γ-gliadins | EMBO J. 3: 1409-15, 1984 |
| Barley ltr1 promoter | Diaz et al. (1995) Mol Gen Genet 248(5): 592-8 |
| Barley B1, C, D, hordein | Theor Appl Gen 98: 1253-62, 1999; Plant J 4: 343-55, 1993; |
| | Mol Gen Genet 250: 750-60, 1996 |
| Barley DOF | Mena et al, The Plant Journal, 116(1): 53-62, 1998 |
| blz2 | EP99106056.7 |
| Synthetic promoter | Vicente-Carbajosa et al., Plant J. 13: 629-640, 1998. |
| rice prolamin NRP33 | Wu et al, Plant Cell Physiology 39(8) 885-889, 1998 |
| rice a-globulin Glb-1 | Wu et al, Plant Cell Physiology 39(8) 885-889, 1998 |
| rice OSH1 | Sato et al, Proc. Natl. Acad. Sci. USA, 93: 8117-8122, |
| | 1996 |
| rice α-globulin REB/OHP-1 | Nakase et al. Plant Mol. Biol. 33: 513-522, 1997 |
| rice ADP-glucose pyrophosphorylase | Trans Res 6: 157-68, 1997 |
| Maize ESR gene family | Plant J 12: 235-46, 1997 |
| Sorghum α-kafirin | DeRose et al. Plant Mol. Biol 32: 1029-35, 1996 |
| KNOX | Postma-Haarsma et al, Plant Mol. Biol. 39: 257-71, 1999 |
| rice oleosin | Wu et al, J. Biochem. 123: 386, 1998 |
| sunflower oleosin | Cummins et al., Plant Mol. Biol. 19: 873-876, 1992 |
| PRO0117, putative rice 40S | WO 2004/070039 |
| ribosomal protein | |
| PRO0136, rice alanine | Unpublished |
| aminotransferase | |
| PRO0147, trypsin inhibitor ITR1 | Unpublished |
| (barley) | |
| PRO0151, rice WSI18 | WO 2004/070039 |
| PRO0175, rice RAB21 | WO 2004/070039 |
| PRO005 | WO 2004/070039 |
| PRO0095 | WO 2004/070039 |
| α-amylase (Amy32b) | Lanahan et al, Plant Cell 4: 203-211, 1992; Skriver et al, |
| | Proc Natl Acad Sci USA 88: 7266-7270, 1991 |
| Cathepsin β-like gene | Cejudo et al, Plant Mol Biol 20: 849-856, 1992 |
| Barley Ltp2 | Kalla et al., Plant J. 6: 849-60, 1994 |
| Chi26 | Leah et al., Plant J. 4: 579-89, 1994 |
| Maize B-Peru | Selinger et al., Genetics 149; 1125-38, 1998 |

[0088] A green tissue-specific promoter as defined herein is a promoter that is transcriptionally active predominantly in green tissue, substantially to the exclusion of any other parts of a plant, whilst still allowing for any leaky expression in these other plant parts. From 59392: Examples of green tissue-specific promoters are given in Nomura et al., 2000 Plant Mol Biol. 44(1):99-106; WO 2004/070039.

[0089] Another example of a tissue-specific promoter is a meristem-specific promoter, which is transcriptionally active predominantly in meristematic tissue, substantially to the exclusion of any other parts of a plant, whilst still allowing for any leaky expression in these other plant parts.

### Terminator

[0090] The term “terminator” encompasses a control sequence which is a DNA sequence at the end of a transcriptional unit which signals 3′ processing and polyadenylation of a primary transcript and termination of transcription. The terminator can be derived from the natural gene, from a variety of other plant genes, or from T-DNA. The terminator to be added may be derived from, for example, the nopaline synthase or octopine synthase genes, or alternatively from another plant gene, or less preferably from any other eukaryotic gene.

### Modulation

[0091] The term “modulation” means in relation to expression or gene expression, a process in which the expression level is changed by said gene expression in comparison to the control plant, the expression level may be increased or decreased. The original, unmodulated expression may be of any kind of expression of a structural RNA (rRNA, tRNA) or mRNA with subsequent translation. The term “modulating the activity” shall mean any change of the expression of the inventive nucleic acid sequences or encoded proteins, which leads to increased yield and/or increased growth of the plants.

### Expression

[0092] The term “expression” or “gene expression” means the transcription of a specific gene or specific genes or specific genetic construct. The term “expression” or “gene expression” in particular means the transcription of a gene or genes or genetic construct into structural RNA (rRNA, tRNA) or mRNA with or without subsequent translation of the latter into a protein. The process includes transcription of DNA and processing of the resulting mRNA product.

### Increased Expression/Overexpression

[0093] The term “increased expression” or “overexpression” as used herein means any form of expression that is additional to the original wild-type expression level.

[0094] Methods for increasing expression of genes or gene products are well documented in the art and include, for example, overexpression driven by appropriate promoters, the use of transcription enhancers or translation enhancers. Isolated nucleic acids which serve as promoter or enhancer elements may be introduced in an appropriate position (typically upstream) of a non-heterologous form of a polynucleotide so as to upregulate expression of a nucleic acid encoding the polypeptide of interest. For example, endogenous promoters may be altered in vivo by mutation, deletion, and/or substitution (see, Kmiec, U.S. Pat. No. 5,565,350; Zarling et al., WO9322443), or isolated promoters may be introduced into a plant cell in the proper orientation and distance from a gene of the present invention so as to control the expression of the gene.

[0095] If polypeptide expression is desired, it is generally desirable to include a polyadenylation region at the 3′-end of a polynucleotide coding region. The polyadenylation region can be derived from the natural gene, from a variety of other plant genes, or from T-DNA. The 3′ end sequence to be added may be derived from, for example, the nopaline synthase or octopine synthase genes, or alternatively from another plant gene, or less preferably from any other eukaryotic gene.

[0096] An intron sequence may also be added to the 5′ untranslated region (UTR) or the coding sequence of the partial coding sequence to increase the amount of the mature message that accumulates in the cytosol. Inclusion of a spliceable intron in the transcription unit in both plant and animal expression constructs has been shown to increase gene expression at both the mRNA and protein levels up to 1000-fold (Buchman and Berg (1988) Mol. Cell biol. 8: 4395-4405; Callis et al. (1987) Genes Dev 1:1183-1200). Such intron enhancement of gene expression is typically greatest when placed near the 5′ end of the transcription unit. Use of the maize introns Adh1-S intron 1, 2, and 6, the Bronze-1 intron are known in the art. For general information see: The Maize Handbook, Chapter 116, Freeling and Walbot, Eds., Springer, N.Y. (1994).

### Endogenous Gene

[0097] Reference herein to an “endogenous” gene not only refers to the gene in question as found in a plant in its natural form (i.e., without there being any human intervention), but also refers to that same gene (or a substantially homologous nucleic acid/gene) in an isolated form subsequently (re)introduced into a plant (a transgene). For example, a transgenic plant containing such a transgene may encounter a substantial reduction of the transgene expression and/or substantial reduction of expression of the endogenous gene. The isolated gene may be isolated from an organism or may be manmade, for example by chemical synthesis.

### Decreased Expression

[0098] Reference herein to “decreased expression” or “reduction or substantial elimination” of expression is taken to mean a decrease in endogenous gene expression and/or polypeptide levels and/or polypeptide activity relative to control plants. The reduction or substantial elimination is in increasing order of preference at least 10%, 20%, 30%, 40% or 50%, 60%, 70%, 80%, 85%, 90%, or 95%, 96%, 97%, 98%, 99% or more reduced compared to that of control plants.

[0099] For optimal performance, the gene silencing techniques used for reducing expression in a plant of an endogenous gene requires the use of nucleic acid sequences from monocotyledonous plants for transformation of monocotyledonous plants, and from dicotyledonous plants for transformation of dicotyledonous plants. Preferably, a nucleic acid sequence from any given plant species is introduced into that same species. For example, a nucleic acid sequence from rice is transformed into a rice plant. However, it is not an absolute requirement that the nucleic acid sequence to be introduced originates from the same plant species as the plant in which it will be introduced. It is sufficient that there is substantial homology between the endogenous target gene and the nucleic acid to be introduced.

### From 59391:

[0100] For the reduction or substantial elimination of expression an endogenous gene in a plant, a sufficient length of substantially contiguous nucleotides of a nucleic acid sequence is required. In order to perform gene silencing, this may be as little as 20, 19, 18, 17, 16, 15, 14, 13, 12, 11, 10 or fewer nucleotides, alternatively this may be as much as the entire gene (including the 5′ and/or 3′ UTR, either in part or in whole). The stretch of substantially contiguous nucleotides may be derived from the nucleic acid encoding the protein of interest (target gene), or from any nucleic acid capable of encoding an orthologue, paralogue or homologue of the protein of interest. Preferably, the stretch of substantially contiguous nucleotides is capable of forming hydrogen bonds with the target gene (either sense or antisense strand), more preferably, the stretch of substantially contiguous nucleotides has, in increasing order of preference, 50%, 60%, 70%, 80%, 85%, 90%, 95%, 96%, 97%, 98%, 99%, 100% sequence identity to the target gene (either sense or antisense strand). A nucleic acid sequence encoding a (functional) polypeptide is not a requirement for the various methods discussed herein for the reduction or substantial elimination of expression of an endogenous gene.

[0101] This reduction or substantial elimination of expression may be achieved using routine tools and techniques. A preferred method for the reduction or substantial elimination of endogenous gene expression is by introducing and expressing in a plant a genetic construct into which the nucleic acid (in this case a stretch of substantially contiguous nucleotides derived from the gene of interest, or from any nucleic acid capable of encoding an orthologue, paralogue or homologue of any one of the protein of interest) is cloned as an inverted repeat (in part or completely), separated by a spacer (non-coding DNA).

[0102] In such a preferred method, expression of the endogenous gene is reduced or substantially eliminated through RNA-mediated silencing using an inverted repeat of a nucleic acid or a part thereof (in this case a stretch of substantially contiguous nucleotides derived from the gene of interest, or from any nucleic acid capable of encoding an orthologue, paralogue or homologue of the protein of interest), preferably capable of forming a hairpin structure. The inverted repeat is cloned in an expression vector comprising control sequences. A non-coding DNA nucleic acid sequence (a spacer, for example a matrix attachment region fragment (MAR), an intron, a polylinker, etc.) is located between the two inverted nucleic acids forming the inverted repeat. After transcription of the inverted repeat, a chimeric RNA with a self-complementary structure is formed (partial or complete). This double-stranded RNA structure is referred to as the hairpin RNA (hpRNA). The hpRNA is processed by the plant into siRNAs that are incorporated into an RNA-induced silencing complex (RISC). The RISC further cleaves the mRNA transcripts, thereby substantially reducing the number of mRNA transcripts to be translated into polypeptides. For further general details see for example, Grierson et al. (1998) WO 98/53083; Waterhouse et al. (1999) WO 99/53050).

[0103] Performance of the methods of the invention does not rely on introducing and expressing in a plant a genetic construct into which the nucleic acid is cloned as an inverted repeat, but any one or more of several well-known “gene silencing” methods may be used to achieve the same effects.

[0104] One such method for the reduction of endogenous gene expression is RNA-mediated silencing of gene expression (downregulation). Silencing in this case is triggered in a plant by a double stranded RNA sequence (dsRNA) that is substantially similar to the target endogenous gene. This dsRNA is further processed by the plant into about 20 to about 26 nucleotides called short interfering RNAs (siRNAs). The siRNAs are incorporated into an RNA-induced silencing complex (RISC) that cleaves the mRNA transcript of the endogenous target gene, thereby substantially reducing the number of mRNA transcripts to be translated into a polypeptide. Preferably, the double stranded RNA sequence corresponds to a target gene.

[0105] Another example of an RNA silencing method involves the introduction of nucleic acid sequences or parts thereof (in this case a stretch of substantially contiguous nucleotides derived from the gene of interest, or from any nucleic acid capable of encoding an orthologue, paralogue or homologue of the protein of interest) in a sense orientation into a plant. “Sense orientation” refers to a DNA sequence that is homologous to an mRNA transcript thereof. Introduced into a plant would therefore be at least one copy of the nucleic acid sequence. The additional nucleic acid sequence will reduce expression of the endogenous gene, giving rise to a phenomenon known as co-suppression. The reduction of gene expression will be more pronounced if several additional copies of a nucleic acid sequence are introduced into the plant, as there is a positive correlation between high transcript levels and the triggering of co-suppression.

[0106] Another example of an RNA silencing method involves the use of antisense nucleic acid sequences. An “antisense” nucleic acid sequence comprises a nucleotide sequence that is complementary to a “sense” nucleic acid sequence encoding a protein, i.e. complementary to the coding strand of a double-stranded cDNA molecule or complementary to an mRNA transcript sequence. The antisense nucleic acid sequence is preferably complementary to the endogenous gene to be silenced. The complementarity may be located in the “coding region” and/or in the “non-coding region” of a gene. The term “coding region” refers to a region of the nucleotide sequence comprising codons that are translated into amino acid residues. The term “non-coding region” refers to 5′ and 3′ sequences that flank the coding region that are transcribed but not translated into amino acids (also referred to as 5′ and 3′ untranslated regions).

[0107] Antisense nucleic acid sequences can be designed according to the rules of Watson and Crick base pairing. The antisense nucleic acid sequence may be complementary to the entire nucleic acid sequence (in this case a stretch of substantially contiguous nucleotides derived from the gene of interest, or from any nucleic acid capable of encoding an orthologue, paralogue or homologue of the protein of interest), but may also be an oligonucleotide that is antisense to only a part of the nucleic acid sequence (including the mRNA 5′ and 3′ UTR). For example, the antisense oligonucleotide sequence may be complementary to the region surrounding the translation start site of an mRNA transcript encoding a polypeptide. The length of a suitable antisense oligonucleotide sequence is known in the art and may start from about 50, 45, 40, 35, 30, 25, 20, 15 or 10 nucleotides in length or less. An antisense nucleic acid sequence according to the invention may be constructed using chemical synthesis and enzymatic ligation reactions using methods known in the art. For example, an antisense nucleic acid sequence (e.g., an antisense oligonucleotide sequence) may be chemically synthesized using naturally occurring nucleotides or variously modified nucleotides designed to increase the biological stability of the molecules or to increase the physical stability of the duplex formed between the antisense and sense nucleic acid sequences, e.g., phosphorothioate derivatives and acridine substituted nucleotides may be used. Examples of modified nucleotides that may be used to generate the antisense nucleic acid sequences are well known in the art. Known nucleotide modifications include methylation, cyclization and ‘caps’ and substitution of one or more of the naturally occurring nucleotides with an analogue such as inosine. Other modifications of nucleotides are well known in the art.

[0108] The antisense nucleic acid sequence can be produced biologically using an expression vector into which a nucleic acid sequence has been subcloned in an antisense orientation (i.e., RNA transcribed from the inserted nucleic acid will be of an antisense orientation to a target nucleic acid of interest). Preferably, production of antisense nucleic acid sequences in plants occurs by means of a stably integrated nucleic acid construct comprising a promoter, an operably linked antisense oligonucleotide, and a terminator.

[0109] The nucleic acid molecules used for silencing in the methods of the invention (whether introduced into a plant or generated in situ) hybridize with or bind to mRNA transcripts and/or genomic DNA encoding a polypeptide to thereby inhibit expression of the protein, e.g., by inhibiting transcription and/or translation. The hybridization can be by conventional nucleotide complementarity to form a stable duplex, or, for example, in the case of an antisense nucleic acid sequence which binds to DNA duplexes, through specific interactions in the major groove of the double helix. Antisense nucleic acid sequences may be introduced into a plant by transformation or direct injection at a specific tissue site. Alternatively, antisense nucleic acid sequences can be modified to target selected cells and then administered systemically. For example, for systemic administration, antisense nucleic acid sequences can be modified such that they specifically bind to receptors or antigens expressed on a selected cell surface, e.g., by linking the antisense nucleic acid sequence to peptides or antibodies which bind to cell surface receptors or antigens. The antisense nucleic acid sequences can also be delivered to cells using the vectors described herein.

[0110] According to a further aspect, the antisense nucleic acid sequence is an a-anomeric nucleic acid sequence. An a-anomeric nucleic acid sequence forms specific double-stranded hybrids with complementary RNA in which, contrary to the usual b-units, the strands run parallel to each other (Gaultier et al. (1987) Nucl Ac Res 15: 6625-6641). The antisense nucleic acid sequence may also comprise a 2′-o-methylribonucleotide (Inoue et al. (1987) Nucl Ac Res 15, 6131-6148) or a chimeric RNA-DNA analogue (Inoue et al. (1987) FEBS Lett. 215, 327-330).

[0111] The reduction or substantial elimination of endogenous gene expression may also be performed using ribozymes. Ribozymes are catalytic RNA molecules with ribonuclease activity that are capable of cleaving a single-stranded nucleic acid sequence, such as an mRNA, to which they have a complementary region. Thus, ribozymes (e.g., hammerhead ribozymes (described in Haselhoff and Gerlach (1988) Nature 334, 585-591) can be used to catalytically cleave mRNA transcripts encoding a polypeptide, thereby substantially reducing the number of mRNA transcripts to be translated into a polypeptide. A ribozyme having specificity for a nucleic acid sequence can be designed (see for example: Cech et al. U.S. Pat. No. 4,987,071; and Cech et al. U.S. Pat. No. 5,116,742). Alternatively, mRNA transcripts corresponding to a nucleic acid sequence can be used to select a catalytic RNA having a specific ribonuclease activity from a pool of RNA molecules (Bartel and Szostak (1993) Science 261, 1411-1418). The use of ribozymes for gene silencing in plants is known in the art (e.g., Atkins et al. (1994) WO 94/00012; Lenne et al. (1995) WO 95/03404; Lutziger et al. (2000) WO 00/00619; Prinsen et al. (1997) WO 97/13865 and Scott et al. (1997) WO 97/38116).

[0112] Gene silencing may also be achieved by insertion mutagenesis (for example, T-DNA insertion or transposon insertion) or by strategies as described by, among others, Angell and Baulcombe ((1999) Plant J 20(3): 357-62), (Amplicon VIGS WO 98/36083), or Baulcombe (WO 99/15682).

[0113] Gene silencing may also occur if there is a mutation on an endogenous gene and/or a mutation on an isolated gene/nucleic acid subsequently introduced into a plant. The reduction or substantial elimination may be caused by a non-functional polypeptide. For example, a polypeptide may bind to various interacting proteins; one or more mutation(s) and/or truncation(s) may therefore provide for a polypeptide that is still able to bind interacting proteins (such as receptor proteins) but that cannot exhibit its normal function (such as signalling ligand).

[0114] A further approach to gene silencing is by targeting nucleic acid sequences complementary to the regulatory region of the gene (e.g., the promoter and/or enhancers) to form triple helical structures that prevent transcription of the gene in target cells. See Helene, C., Anticancer Drug Res. 6, 569-84, 1991; Helene et al., Ann. N.Y. Acad. Sci. 660, 27-36 1992; and Maher, L. J. Bioassays 14, 807-15, 1992.

[0115] Other methods, such as the use of antibodies directed to an endogenous polypeptide for inhibiting its function in planta, or interference in the signalling pathway in which a polypeptide is involved, will be well known to the skilled man. In particular, it can be envisaged that manmade molecules may be useful for inhibiting the biological function of a target polypeptide, or for interfering with the signalling pathway in which the target polypeptide is involved.

[0116] Alternatively, a screening program may be set up to identify in a plant population natural variants of a gene, which variants encode polypeptides with reduced activity. Such natural variants may also be used for example, to perform homologous recombination.

[0117] Artificial and/or natural microRNAs (miRNAs) may be used to knock out gene expression and/or mRNA translation. Endogenous miRNAs are single stranded small RNAs of typically 19-24 nucleotides long. They function primarily to regulate gene expression and/or mRNA translation. Most plant microRNAs (miRNAs) have perfect or near-perfect complementarity with their target sequences. However, there are natural targets with up to five mismatches. They are processed from longer non-coding RNAs with characteristic fold-back structures by double-strand specific RNases of the Dicer family. Upon processing, they are incorporated in the RNA-induced silencing complex (RISC) by binding to its main component, an Argonaute protein. MiRNAs serve as the specificity components of RISC, since they base-pair to target nucleic acids, mostly mRNAs, in the cytoplasm. Subsequent regulatory events include target mRNA cleavage and destruction and/or translational inhibition. Effects of miRNA overexpression are thus often reflected in decreased mRNA levels of target genes.

[0118] Artificial microRNAs (amiRNAs), which are typically 21 nucleotides in length, can be genetically engineered specifically to negatively regulate gene expression of single or multiple genes of interest. Determinants of plant microRNA target selection are well known in the art. Empirical parameters for target recognition have been defined and can be used to aid in the design of specific amiRNAs, (Schwab et al., Dev. Cell 8, 517-527, 2005). Convenient tools for design and generation of amiRNAs and their precursors are also available to the public (Schwab et al., Plant Cell 18, 1121-1133, 2006).

[0119] For optimal performance, the gene silencing techniques used for reducing expression in a plant of an endogenous gene requires the use of nucleic acid sequences from monocotyledonous plants for transformation of monocotyledonous plants, and from dicotyledonous plants for transformation of dicotyledonous plants. Preferably, a nucleic acid sequence from any given plant species is introduced into that same species. For example, a nucleic acid sequence from rice is transformed into a rice plant. However, it is not an absolute requirement that the nucleic acid sequence to be introduced originates from the same plant species as the plant in which it will be introduced. It is sufficient that there is substantial homology between the endogenous target gene and the nucleic acid to be introduced.

[0120] Described above are examples of various methods for the reduction or substantial elimination of expression in a plant of an endogenous gene. A person skilled in the art would readily be able to adapt the aforementioned methods for silencing so as to achieve reduction of expression of an endogenous gene in a whole plant or in parts thereof through the use of an appropriate promoter, for example.

[0121] A person skilled in the art is familiar with the various techniques for decreasing expression of a gene.

[0122] Selectable Marker (Gene)/Reporter Gene

[0123] “Selectable marker”, “selectable marker gene” or “reporter gene” includes any gene that confers a phenotype on a cell in which it is expressed to facilitate the identification and/or selection of cells that are transfected or transformed with a nucleic acid construct of the invention. These marker genes enable the identification of a successful transfer of the nucleic acid molecules via a series of different principles. Suitable markers may be selected from markers that confer antibiotic or herbicide resistance, that introduce a new metabolic trait or that allow visual selection. Examples of selectable marker genes include genes conferring resistance to antibiotics (such as nptII that phosphorylates neomycin and kanamycin, or hpt, phosphorylating hygromycin, or genes conferring resistance to, for example, bleomycin, streptomycin, tetracyclin, chloramphenicol, ampicillin, gentamycin, geneticin (G418), spectinomycin or blasticidin), to herbicides (for example bar which provides resistance to Basta®; aroA or gox providing resistance against glyphosate, or the genes conferring resistance to, for example, imidazolinone, phosphinothricin or sulfonylurea), or genes that provide a metabolic trait (such as manA that allows plants to use mannose as sole carbon source or xylose isomerase for the utilisation of xylose, or antinutritive markers such as the resistance to 2-deoxyglucose). Expression of visual marker genes results in the formation of colour (for example β-glucuronidase, GUS or β-galactosidase with its coloured substrates, for example X-Gal), luminescence (such as the luciferin/luceferase system) or fluorescence (Green Fluorescent Protein, GFP, and derivatives thereof). This list represents only a small number of possible markers. The skilled worker is familiar with such markers. Different markers are preferred, depending on the organism and the selection method.

[0124] It is known that upon stable or transient integration of nucleic acids into plant cells, only a minority of the cells takes up the foreign DNA and, if desired, integrates it into its genome, depending on the expression vector used and the transfection technique used. To identify and select these integrants, a gene coding for a selectable marker (such as the ones described above) is usually introduced into the host cells together with the gene of interest. These markers can for example be used in mutants in which these genes are not functional by, for example, deletion by conventional methods. Furthermore, nucleic acid molecules encoding a selectable marker can be introduced into a host cell on the same vector that comprises the sequence encoding the polypeptides of the invention or used in the methods of the invention, or else in a separate vector. Cells which have been stably transfected with the introduced nucleic acid can be identified for example by selection (for example, cells which have integrated the selectable marker survive whereas the other cells die).

[0125] Since the marker genes, particularly genes for resistance to antibiotics and herbicides, are no longer required or are undesired in the transgenic host cell once the nucleic acids have been introduced successfully, the process according to the invention for introducing the nucleic acids advantageously employs techniques which enable the removal or excision of these marker genes. One such a method is what is known as co-transformation. The co-transformation method employs two vectors simultaneously for the transformation, one vector bearing the nucleic acid according to the invention and a second bearing the marker gene(s). A large proportion of transformants receives or, in the case of plants, comprises (up to 40% or more of the transformants), both vectors. In case of transformation with Agrobacteria, the transformants usually receive only a part of the vector, i.e. the sequence flanked by the T-DNA, which usually represents the expression cassette. The marker genes can subsequently be removed from the transformed plant by performing crosses. In another method, marker genes integrated into a transposon are used for the transformation together with desired nucleic acid (known as the Ac/Ds technology). The transformants can be crossed with a transposase source or the transformants are transformed with a nucleic acid construct conferring expression of a transposase, transiently or stable. In some cases (approx. 10%), the transposon jumps out of the genome of the host cell once transformation has taken place successfully and is lost. In a further number of cases, the transposon jumps to a different location. In these cases the marker gene must be eliminated by performing crosses. In microbiology, techniques were developed which make possible, or facilitate, the detection of such events. A further advantageous method relies on what is known as recombination systems; whose advantage is that elimination by crossing can be dispensed with. The best-known system of this type is what is known as the Cre/lox system. Cre1 is a recombinase that removes the sequences located between the loxP sequences. If the marker gene is integrated between the loxP sequences, it is removed once transformation has taken place successfully, by expression of the recombinase. Further recombination systems are the HIN/HIX, FLP/FRT and REP/STB system (Tribble et al., J. Biol. Chem., 275, 2000: 22255-22267; Velmurugan et al., J. Cell Biol., 149, 2000: 553-566). A site-specific integration into the plant genome of the nucleic acid sequences according to the invention is possible. Naturally, these methods can also be applied to microorganisms such as yeast, fungi or bacteria.

### Transgenic/Transgene/Recombinant

[0126] For the purposes of the invention, “transgenic”, “transgene” or “recombinant” means with regard to, for example, a nucleic acid sequence, an expression cassette, gene construct or a vector comprising the nucleic acid sequence or an organism transformed with the nucleic acid sequences, expression cassettes or vectors according to the invention, all those constructions brought about by recombinant methods in which either
[0127] (a) the nucleic acid sequences encoding proteins useful in the methods of the invention, or
[0128] (b) genetic control sequence(s) which is operably linked with the nucleic acid sequence according to the invention, for example a promoter, or
[0129] (c) a) and b)
   are not located in their natural genetic environment or have been modified by recombinant methods, it being possible for the modification to take the form of, for example, a substitution, addition, deletion, inversion or insertion of one or more nucleotide residues. The natural genetic environment is understood as meaning the natural genomic or chromosomal locus in the original plant or the presence in a genomic library. In the case of a genomic library, the natural genetic environment of the nucleic acid sequence is preferably retained, at least in part. The environment flanks the nucleic acid sequence at least on one side and has a sequence length of at least 50 bp, preferably at least 500 bp, especially preferably at least 1000 bp, most preferably at least 5000 bp. A naturally occurring expression cassette—for example the naturally occurring combination of the natural promoter of the nucleic acid sequences with the corresponding nucleic acid sequence encoding a polypeptide useful in the methods of the present invention, as defined above—becomes a transgenic expression cassette when this expression cassette is modified by non-natural, synthetic (“artificial”) methods such as, for example, mutagenic treatment. Suitable methods are described, for example, in U.S. Pat. No. 5,565,350 or WO 00/15815.

[0130] A transgenic plant for the purposes of the invention is thus understood as meaning, as above, that the nucleic acids used in the method of the invention are not at their natural locus in the genome of said plant, it being possible for the nucleic acids to be expressed homologously or heterologously. However, as mentioned, transgenic also means that, while the nucleic acids according to the invention or used in the inventive method are at their natural position in the genome of a plant, the sequence has been modified with regard to the natural sequence, and/or that the regulatory sequences of the natural sequences have been modified. Transgenic is preferably understood as meaning the expression of the nucleic acids according to the invention at an unnatural locus in the genome, i.e. homologous or, preferably, heterologous expression of the nucleic acids takes place. Preferred transgenic plants are mentioned herein.

### Transformation

[0131] The term “introduction” or “transformation” as referred to herein encompasses the transfer of an exogenous polynucleotide into a host cell, irrespective of the method used for transfer. Plant tissue capable of subsequent clonal propagation, whether by organogenesis or embryogenesis, may be transformed with a genetic construct of the present invention and a whole plant regenerated there from. The particular tissue chosen will vary depending on the clonal propagation systems available for, and best suited to, the particular species being transformed. Exemplary tissue targets include leaf disks, pollen, embryos, cotyledons, hypocotyls, megagametophytes, callus tissue, existing meristematic tissue (e.g., apical meristem, axillary buds, and root meristems), and induced meristem tissue (e.g., cotyledon meristem and hypocotyl meristem). The polynucleotide may be transiently or stably introduced into a host cell and may be maintained non-integrated, for example, as a plasmid.

[0132] Alternatively, it may be integrated into the host genome. The resulting transformed plant cell may then be used to regenerate a transformed plant in a manner known to persons skilled in the art.

[0133] The transfer of foreign genes into the genome of a plant is called transformation. Transformation of plant species is now a fairly routine technique. Advantageously, any of several transformation methods may be used to introduce the gene of interest into a suitable ancestor cell. The methods described for the transformation and regeneration of plants from plant tissues or plant cells may be utilized for transient or for stable transformation. Transformation methods include the use of liposomes, electroporation, chemicals that increase free DNA uptake, injection of the DNA directly into the plant, particle gun bombardment, transformation using viruses or pollen and microprojection. Methods may be selected from the calcium/polyethylene glycol method for protoplasts (Krens, F. A. et al., (1982) Nature 296, 72-74; Negrutiu I et al. (1987) Plant Mol Biol 8: 363-373); electroporation of protoplasts (Shillito R. D. et al. (1985) Bio/Technol 3, 1099-1102); microinjection into plant material (Crossway A et al., (1986) Mol. Gen Genet 202: 179-185); DNA or RNA-coated particle bombardment (Klein TM et al., (1987) Nature 327: 70) infection with (non-integrative) viruses and the like. Transgenic plants, including transgenic crop plants, are preferably produced via Agrobacterium-mediated transformation. An advantageous transformation method is the transformation in planta. To this end, it is possible, for example, to allow the agrobacteria to act on plant seeds or to inoculate the plant meristem with agrobacteria. It has proved particularly expedient in accordance with the invention to allow a suspension of transformed agrobacteria to act on the intact plant or at least on the flower primordia. The plant is subsequently grown on until the seeds of the treated plant are obtained (Clough and Bent, Plant J. (1998) 16, 735-743). Methods for Agrobacterium-mediated transformation of rice include well known methods for rice transformation, such as those described in any of the following: European patent application EP 1198985 A1, Aldemita and Hodges (Planta 199: 612-617, 1996); Chan et al. (Plant Mol Biol 22 (3): 491-506, 1993), Hiei et al. (Plant J 6 (2): 271-282, 1994), which disclosures are incorporated by reference herein as if fully set forth. In the case of corn transformation, the preferred method is as described in either Ishida et al. (Nat. Biotechnol 14(6): 745-50, 1996) or Frame et al. (Plant Physiol 129(1): 13-22, 2002), which disclosures are incorporated by reference herein as if fully set forth. Said methods are further described by way of example in B. Jenes et al., Techniques for Gene Transfer, in: Transgenic Plants, Vol. 1, Engineering and Utilization, eds. S. D. Kung and R. Wu, Academic Press (1993) 128-143 and in Potrykus Annu. Rev. Plant Physiol. Plant Molec. Biol. 42 (1991) 205-225). The nucleic acids or the construct to be expressed is preferably cloned into a vector, which is suitable for transforming Agrobacterium tumefaciens, for example pBin19 (Bevan et al., Nucl. Acids Res. 12 (1984) 8711). Agrobacteria transformed by such a vector can then be used in known manner for the transformation of plants, such as plants used as a model, like Arabidopsis (Arabidopsis thaliana is within the scope of the present invention not considered as a crop plant), or crop plants such as, by way of example, tobacco plants, for example by immersing bruised leaves or chopped leaves in an agrobacterial solution and then culturing them in suitable media. The transformation of plants by means of Agrobacterium tumefaciens is described, for example, by Hofgen and Willmitzer in Nucl. Acid Res. (1988) 16, 9877 or is known inter alia from F. F. White, Vectors for Gene Transfer in Higher Plants; in Transgenic Plants, Vol. 1, Engineering and Utilization, eds. S. D. Kung and R. Wu, Academic Press, 1993, pp. 15-38.

[0134] In addition to the transformation of somatic cells, which then have to be regenerated into intact plants, it is also possible to transform the cells of plant meristems and in particular those cells which develop into gametes. In this case, the transformed gametes follow the natural plant development, giving rise to transgenic plants. Thus, for example, seeds of Arabidopsis are treated with agrobacteria and seeds are obtained from the developing plants of which a certain proportion is transformed and thus transgenic [Feldman, K A and Marks M D (1987). Mol Gen Genet 208:274-289; Feldmann K (1992). In: C Koncz, N-H Chua and J Shell, eds, Methods in Arabidopsis Research. Word Scientific, Singapore, pp. 274-289]. Alternative methods are based on the repeated removal of the inflorescences and incubation of the excision site in the center of the rosette with transformed agrobacteria, whereby transformed seeds can likewise be obtained at a later point in time (Chang (1994). Plant J. 5: 551-558; Katavic (1994). Mol Gen Genet, 245: 363-370). However, an especially effective method is the vacuum infiltration method with its modifications such as the “floral dip” method. In the case of vacuum infiltration of Arabidopsis, intact plants under reduced pressure are treated with an agrobacterial suspension [Bechthold, N (1993). C R Acad Sci Paris Life Sci, 316: 1194-1199], while in the case of the “floral dip” method the developing floral tissue is incubated briefly with a surfactant-treated agrobacterial suspension [Clough, S J and Bent A F (1998) The Plant J. 16, 735-743]. A certain proportion of transgenic seeds are harvested in both cases, and these seeds can be distinguished from non-transgenic seeds by growing under the above-described selective conditions. In addition the stable transformation of plastids is of advantages because plastids are inherited maternally is most crops reducing or eliminating the risk of transgene flow through pollen. The transformation of the chloroplast genome is generally achieved by a process which has been schematically displayed in Klaus et al., 2004 [Nature Biotechnology 22 (2), 225-229]. Briefly the sequences to be transformed are cloned together with a selectable marker gene between flanking sequences homologous to the chloroplast genome. These homologous flanking sequences direct site specific integration into the plastome.

[0135] Plastidal transformation has been described for many different plant species and an overview is given in Bock (2001) Transgenic plastids in basic research and plant biotechnology. J Mol Biol. 2001 Sep. 21; 312 (3):425-38 or Maliga, P (2003) Progress towards commercialization of plastid transformation technology. Trends Biotechnol. 21, 20-28. Further biotechnological progress has recently been reported in form of marker free plastid transformants, which can be produced by a transient co-integrated maker gene (Klaus et al., 2004, Nature Biotechnology 22(2), 225-229).

### T-DNA Activation Tagging

[0136] T-DNA activation tagging (Hayashi et al. Science (1992) 1350-1353), involves insertion of T-DNA, usually containing a promoter (may also be a translation enhancer or an intron), in the genomic region of the gene of interest or 10 kb up- or downstream of the coding region of a gene in a configuration such that the promoter directs expression of the targeted gene. Typically, regulation of expression of the targeted gene by its natural promoter is disrupted and the gene falls under the control of the newly introduced promoter. The promoter is typically embedded in a T-DNA. This T-DNA is randomly inserted into the plant genome, for example, through Agrobacterium infection and leads to modified expression of genes near the inserted T-DNA. The resulting transgenic plants show dominant phenotypes due to modified expression of genes close to the introduced promoter.

### TILLING

[0137] The term “TILLING” is an abbreviation of “Targeted Induced Local Lesions In Genomes” and refers to a mutagenesis technology useful to generate and/or identify nucleic acids encoding proteins with modified expression and/or activity. TILLING also allows selection of plants carrying such mutant variants. These mutant variants may exhibit modified expression, either in strength or in location or in timing (if the mutations affect the promoter for example). These mutant variants may exhibit higher activity than that exhibited by the gene in its natural form. TILLING combines high-density mutagenesis with high-throughput screening methods. The steps typically followed in TILLING are: (a) EMS mutagenesis (Redei G P and Koncz C (1992) In Methods in Arabidopsis Research, Koncz C, Chua N H, Schell J, eds. Singapore, World Scientific Publishing Co, pp. 16-82; Feldmann et al., (1994) In Meyerowitz E M, Somerville C R, eds, Arabidopsis. Cold Spring Harbor Laboratory Press, Cold Spring Harbor, N.Y., pp 137-172; Lightner J and Caspar T (1998) In J Martinez-Zapater, J Salinas, eds, Methods on Molecular Biology, Vol. 82. Humana Press, Totowa, N.J., pp 91-104); (b) DNA preparation and pooling of individuals; (c) PCR amplification of a region of interest; (d) denaturation and annealing to allow formation of heteroduplexes; (e) DHPLC, where the presence of a heteroduplex in a pool is detected as an extra peak in the chromatogram; (f) identification of the mutant individual; and (g) sequencing of the mutant PCR product. Methods for TILLING are well known in the art (McCallum et al., (2000) Nat Biotechnol 18: 455-457; reviewed by Stemple (2004) Nat Rev Genet 5(2): 145-50).

### Homologous Recombination

[0138] Homologous recombination allows introduction in a genome of a selected nucleic acid at a defined selected position. Homologous recombination is a standard technology used routinely in biological sciences for lower organisms such as yeast or the moss Physcomitrella. Methods for performing homologous recombination in plants have been described not only for model plants (Offring a et al. (1990) EMBO J 9(10): 3077-84) but also for crop plants, for example rice

[0139] (Terada et al. (2002) Nat Biotech 20(10): 1030-4; Iida and Terada (2004) Curr Opin Biotech 15(2): 132-8), and approaches exist that are generally applicable regardless of the target organism (Miller et al, Nature Biotechnol. 25, 778-785, 2007).

### Yield

[0140] The term “yield” in general means a measurable produce of economic value, typically related to a specified crop, to an area, and to a period of time. Individual plant parts directly contribute to yield based on their number, size and/or weight, or the actual yield is the yield per square meter for a crop and year, which is determined by dividing total production (includes both harvested and appraised production) by planted square meters. The term “yield” of a plant may relate to vegetative biomass (root and/or shoot biomass), to reproductive organs, and/or to propagules (such as seeds) of that plant.

### Early Vigour

[0141] “Early vigour” refers to active healthy well-balanced growth especially during early stages of plant growth, and may result from increased plant fitness due to, for example, the plants being better adapted to their environment (i.e. optimizing the use of energy resources and partitioning between shoot and root). Plants having early vigour also show increased seedling survival and a better establishment of the crop, which often results in highly uniform fields (with the crop growing in uniform manner, i.e. with the majority of plants reaching the various stages of development at substantially the same time), and often better and higher yield. Therefore, early vigour may be determined by measuring various factors, such as thousand kernel weight, percentage germination, percentage emergence, seedling growth, seedling height, root length, root and shoot biomass and many more.

### Increase/Improve/Enhance

[0142] The terms “increase”, “improve” or “enhance” are interchangeable and shall mean in the sense of the application at least a 3%, 4%, 5%, 6%, 7%, 8%, 9% or 10%, preferably at least 15% or 20%, more preferably 25%, 30%, 35% or 40% more yield and/or growth in comparison to control plants as defined herein.

### Seed Yield

[0143] Increased seed yield may manifest itself as one or more of the following: a) an increase in seed biomass (total seed weight) which may be on an individual seed basis and/or per plant and/or per square meter; b) increased number of flowers per plant; c) increased number of (filled) seeds; d) increased seed filling rate (which is expressed as the ratio between the number of filled seeds divided by the total number of seeds); e) increased harvest index, which is expressed as a ratio of the yield of harvestable parts, such as seeds, divided by the total biomass; and f) increased thousand kernel weight (TKW), which is extrapolated from the number of filled seeds counted and their total weight. An increased TKW may result from an increased seed size and/or seed weight, and may also result from an increase in embryo and/or endosperm size.

[0144] An increase in seed yield may also be manifested as an increase in seed size and/or seed volume. Furthermore, an increase in seed yield may also manifest itself as an increase in seed area and/or seed length and/or seed width and/or seed perimeter. Increased yield may also result in modified architecture, or may occur because of modified architecture.

### Greenness Index

[0145] The “greenness index” as used herein is calculated from digital images of plants. For each pixel belonging to the plant object on the image, the ratio of the green value versus the red value (in the RGB model for encoding color) is calculated. The greenness index is expressed as the percentage of pixels for which the green-to-red ratio exceeds a given threshold. Under normal growth conditions, under salt stress growth conditions, and under reduced nutrient availability growth conditions, the greenness index of plants is measured in the last imaging before flowering. In contrast, under drought stress growth conditions, the greenness index of plants is measured in the first imaging after drought.

### Plant

[0146] The term “plant” as used herein encompasses whole plants, ancestors and progeny of the plants and plant parts, including seeds, shoots, stems, leaves, roots (including tubers), flowers, and tissues and organs, wherein each of the aforementioned comprise the gene/nucleic acid of interest. The term “plant” also encompasses plant cells, suspension cultures, callus tissue, embryos, meristematic regions, gametophytes, sporophytes, pollen and microspores, again wherein each of the aforementioned comprises the gene/nucleic acid of interest.

[0147] Plants that are particularly useful in the methods of the invention include all plants which belong to the superfamily Viridiplantae, in particular monocotyledonous and dicotyledonous plants including fodder or forage legumes, ornamental plants, food crops, trees or shrubs selected from the list comprising Acer spp., Actinidia spp., Abelmoschus spp., Agave sisalana, Agropyron spp., Agrostis stolonifera, Allium spp., Amaranthus spp., Ammophila arenaria, Ananas comosus, Annona spp., Apium graveolens, Arachis spp, Artocarpus spp., Asparagus officinalis, Avena spp. (e.g. Avena sativa, Avena fatua, Avena byzantina, Avena fatua var. sativa, Avena hybrida), Averrhoa carambola, Bambusa sp., Benincasa hispida, Bertholletia excelsea, Beta vulgaris, Brassica spp. (e.g. Brassica napus, Brassica rapa ssp. [canola, oilseed rape, turnip rape]), Cadaba farinosa, Camellia sinensis, Canna indica, Cannabis sativa, Capsicum spp., Carex elata, Carica papaya, Carissa macrocarpa, Carya spp., Carthamus tinctorius, Castanea spp., Ceiba pentandra, Cichorium endivia, Cinnamomum spp., Citrullus lanatus, Citrus spp., Cocos spp., Coffea spp., Colocasia esculenta, Cola spp., Corchorus sp., Coriandrum sativum, Corylus spp., Crataegus spp., Crocus sativus, Cucurbita spp., Cucumis spp., Cynara spp., Daucus carota, Desmodium spp., Dimocarpus longan, Dioscorea spp., Diospyros spp., Echinochloa spp., Elaeis (e.g. Elaeis guineensis, Elaeis oleifera), Eleusine coracana, Eragrostis tef, Erianthus sp., Eriobotrya japonica, Eucalyptus sp., Eugenia uniflora, Fagopyrum spp., Fagus spp., Festuca arundinacea, Ficus carica, Fortunella spp., Fragaria spp., Ginkgo biloba, Glycine spp. (e.g. Glycine max, Soja hispida or Soja max), Gossypium hirsutum, Helianthus spp. (e.g. Helianthus annuus), Hemerocallis fulva, Hibiscus spp., Hordeum spp. (e.g. Hordeum vulgare), Ipomoea batatas, Juglans spp., Lactuca sativa, Lathyrus spp., Lens culinaris, Linum usitatissimum, Litchi chinensis, Lotus spp., Luffa acutangula, Lupinus spp., Luzula sylvatica, Lycopersicon spp. (e.g. Lycopersicon esculentum, Lycopersicon lycopersicum, Lycopersicon pyriforme), Macrotyloma spp., Malus spp., Malpighia emarginata, Mammea americana, Mangifera indica, Manihot spp., Manilkara zapota, Medicago sativa, Melilotus spp., Mentha spp., Miscanthus sinensis, Momordica spp., Morus nigra, Musa spp., Nicotiana spp., Olea spp., Opuntia spp., Ornithopus spp., Oryza spp. (e.g. Oryza sativa, Oryza latifolia), Panicum miliaceum, Panicum virgatum, Passiflora edulis, Pastinaca sativa, Pennisetum sp., Persea spp., Petroselinum crispum, Phalaris arundinacea, Phaseolus spp., Phleum pratense, Phoenix spp., Phragmites australis, Physalis spp., Pinus spp., Pistacia vera, Pisum spp., Poa spp., Populus spp., Prosopis spp., Prunus spp., Psidium spp., Punica granatum, Pyrus communis, Quercus spp., Raphanus sativus, Rheum rhabarbarum, Ribes spp., Ricinus communis, Rubus spp., Saccharum spp., Salix sp., Sambucus spp., Secale cereale, Sesamum spp., Sinapis sp., Solanum spp. (e.g. Solanum tuberosum, Solanum integrifolium or Solanum lycopersicum), Sorghum bicolor, Spinacia spp., Syzygium spp., Tagetes spp., Tamarindus indica, Theobroma cacao, Trifolium spp., Tripsacum dactyloides, Triticosecale rimpaui, Triticum spp. (e.g. Triticum aestivum, Triticum durum, Triticum turgidum, Triticum hybernum, Triticum macha, Triticum sativum, Triticum monococcum or Triticum vulgare), Tropaeolum minus, Tropaeolum majus, Vaccinium spp., Vicia spp., Vigna spp., Viola odorata, Vitis spp., Zea mays, Zizania palustris, Ziziphus spp., amongst others.

### DETAILED DESCRIPTION OF THE INVENTION

[0148] Surprisingly, it has now been found that modulating expression in a plant of a nucleic acid encoding a bHLH6-like polypeptide gives plants having enhanced yield-related traits relative to control plants. According to a first embodiment, the present invention provides a method for enhancing yield-related traits in plants relative to control plants, comprising modulating expression in a plant of a nucleic acid encoding a bHLH6-like polypeptide.

[0149] A preferred method for modulating (preferably, increasing) expression of a nucleic acid encoding a bHLH6-like polypeptide is by introducing and expressing in a plant a nucleic acid encoding a bHLH6-like polypeptide.

[0150] In one embodiment any reference hereinafter to a “protein useful in the methods of the invention” is taken to mean a bHLH6-like polypeptide as defined herein. In the same embodiment any reference hereinafter to a “nucleic acid useful in the methods of the invention” is taken to mean a nucleic acid capable of encoding such a bHLH6-like polypeptide. In one embodiment the nucleic acid to be introduced into a plant (and therefore useful in performing the methods of the invention) is any nucleic acid encoding the type of protein which will now be described, hereafter also named “bHLH6-like nucleic acid” or “bHLH6-like gene”.

[0151] A “bHLH6-like polypeptide” as defined herein refers to any polypeptide comprising a basic domain followed by a HLH domain (HMMPFam PF00010, ProfileScan PS50888, SMART SM00353) thereby forming a basic helix-loop-helix domain (Interpro IPR001092). Preferably, the bHLH6-like polypeptide comprises at least one, preferably two, more preferably three or more of the following motifs:

Motif 1 (SEQ ID NO: 3): L (G/E/T) WX (D/E) (G/S) X
(Y/F) (K/N) G (E/D)

wherein X in position 4 can be any amino acid, preferably a turnlike amino acid, more preferably one of G, R, K, T, and S; and wherein X in position 7 can be any amino acid, preferably a hydrophobic or polar amino acid, more preferably one of Y, F, N, and H.

Motif 2 (SEQ ID NO: 4): G (V/I) (V/I/L) E
(V/L/I) (G/A) (S/V/T/A) (T/L/S) (E/D/S)
Motif 3 (SEQ ID NO: 5): (D/E) K (A/V/I) S (L/I/V)
L (G/D/E/A)
Motif 4 (SEQ ID NO: 6): (T/N/S) LQ (Q/H) RLQ
Motif 5 (SEQ ID NO: 7): (K/F) (I/F/V) (I/L/V/M/S)
G (W/L/R/N/E) (E/D) AM (I/V) (G/R) (V/I) (Q/N/E/Y)
Motif 6 (SEQ ID NO: 8): (H/Y) (A/S) (S/N) (V/C/M/
L/T) (S/Q) (V/C/S) (V/MF) (K/N/S) (D/C/E) (L/Q/F/
M) (M/R/L) (I/F/L) (Q/D/H) (Q/D/V)

[0152] Alternatively, the homologue of a bHLH6-like protein has in increasing order of preference at least 25%, 26%, 27%, 28%, 29%, 30%, 31%, 32%, 33%, 34%, 35%, 36%, 37%, 38%, 39%, 40%, 41%, 42%, 43%, 44%, 45%, 46%, 47%, 48%, 49%, 50%, 51%, 52%, 53%, 54%, 55%, 56%, 57%, 58%, 59%, 60%, 61%, 62%, 63%, 64%, 65%, 66%, 67%, 68%, 69%, 70%, 71%, 72%, 73%, 74%, 75%, 76%, 77%, 78%, 79%, 80%, 81%, 82%, 83%, 84%, 85%, 86%, 87%, 88%, 89%, 90%, 91%, 92%, 93%, 94%, 95%, 96%, 97%, 98%, or 99% overall sequence identity to the amino acid represented by SEQ ID NO: 2, provided that the homologous protein comprises the conserved motifs as outlined above. The overall sequence identity is determined using a global alignment algorithm, such as the Needleman Wunsch algorithm in the program GAP (GCG Wisconsin Package, Accelrys), preferably with default parameters. Compared to overall sequence identity, the sequence identity will generally be higher when only conserved domains or motifs are considered. The sequence conservation is much higher in the region of the bHLH domain (see Table B2 in Example 3 and FIG. 2). Therefore the bHLH domain is a good criterion for the defining the group of bHLH6-like proteins. Preferably, the bHLH6-like polypeptide comprises the sequence of Motif 7 (SEQ ID NO: 9): PKKRGRKPAN GREEPLNHVEAERQRREKLNQRFYALRAVVPNVSKMDKASLLGDAIAYINELKSKVVKTE or a sequence that has, in increasing order of preference, at least 80%, 81%, 82%, 83%, 84%, 85%, 86%, 87%, 88%, 89%, 90%, 91%, 92%, 93%, 94%, 95%, 96%, 97%, 98%, or 99% sequence identity to SEQ ID NO: 9. The HLH domain as determined by SMART spans residue 454 to 503 in SEQ ID NO: 2 and is comprised in Motif 7.

[0153] Preferably, the polypeptide sequence which when used in the construction of a phylogenetic tree, such as the one depicted in FIG. 6 in Li et al. (2006), clusters within subgroup N (which comprises the amino acid sequence represented by SEQ ID NO: 2), rather than with any other group.

[0154] Preferably, the genomic DNA sequence encoding the bHLH6-like polypeptide does not comprise introns.

[0155] The terms “domain”, “signature” and “motif” are defined in the “definitions” section herein. Specialist databases exist for the identification of domains, for example, SMART (Schultz et al. (1998) Proc. Natl. Acad. Sci. USA 95, 5857-5864; Letunic et al. (2002) Nucleic Acids Res 30, 242-244), InterPro (Mulder et al., (2003) Nucl. Acids. Res. 31, 315-318), Prosite (Bucher and Bairoch (1994), A generalized profile syntax for biomolecular sequences motifs and its function in automatic sequence interpretation. (In) ISMB-94; Proceedings 2nd International Conference on Intelligent Systems for Molecular Biology. Altman R., Brutlag D., Karp P., Lathrop R., Searls D., Eds., pp 53-61, AAAI Press, Menlo Park; Hula et al., Nucl. Acids. Res. 32:D134-D137, (2004) ), or Pfam (Bateman et al., Nucleic Acids Research 30(1): 276-280 (2002) ). A set of tools for in silico analysis of protein sequences is available on the ExPASy proteomics server (Swiss Institute of Bioinformatics (Gasteiger et al., ExPASy: the proteomics server for in-depth protein knowledge and analysis, Nucleic Acids Res. 31:3784-3788 (2003) ). Domains or motifs may also be identified using routine techniques, such as by sequence alignment.

[0156] Methods for the alignment of sequences for comparison are well known in the art, such methods include GAP, BESTFIT, BLAST, FASTA and TFASTA. GAP uses the algorithm of Needleman and Wunsch ((1970) J Mol Biol 48: 443-453) to find the global (i.e. spanning the complete sequences) alignment of two sequences that maximizes the number of matches and minimizes the number of gaps. The BLAST algorithm (Altschul et al. (1990) J Mol Biol 215: 403-10) calculates percent sequence identity and performs a statistical analysis of the similarity between the two sequences. The software for performing BLAST analysis is publicly available through the National Centre for Biotechnology Information (NCBI). Homologues may readily be identified using, for example, the ClustalW multiple sequence alignment algorithm (version 1.83), with the default pairwise alignment parameters, and a scoring method in percentage. Global percentages of similarity and identity may also be determined using one of the methods available in the MatGAT software package (Campanella et al., BMC Bioinformatics. 2003 Jul. 10; 4:29. MatGAT: an application that generates similarity/identity matrices using protein or DNA sequences.). Minor manual editing may be performed to optimise alignment between conserved motifs, as would be apparent to a person skilled in the art. Furthermore, instead of using full-length sequences for the identification of homologues, specific domains may also be used. The sequence identity values may be determined over the entire nucleic acid or amino acid sequence or over selected domains or conserved motif(s), using the programs mentioned above using the default parameters. For local alignments, the Smith-Waterman algorithm is particularly useful (Smith T F, Waterman M S (1981) J. Mol. Biol 147(1); 195-7).

[0157] Furthermore, bHLH6-like polypeptides (at least in their native form) typically have DNA binding activity. Tools and techniques for measuring DNA binding activity are well known in the art. In addition, as shown in the present invention, a bHLH6-like protein, such as SEQ ID NO: 2, when overexpressed in rice, gives plants having enhanced yield-related traits, in particular emergence vigour and/or increased number of flowers per panicle. Other bioassays are provided in Dombrecht et al. (Plant Cell 19, 2225-2245, 2007). Further details are provided in Examples section.

[0158] The present invention is illustrated by transforming plants with the nucleic acid sequence represented by SEQ ID NO: 1, encoding the polypeptide sequence of SEQ ID NO: 2. However, performance of the invention is not restricted to these sequences; the methods of the invention may advantageously be performed using any bHLH6-like-encoding nucleic acid or bHLH6-like polypeptide as defined herein.

[0159] Examples of nucleic acids encoding bHLH6-like polypeptides are given in Table A1 of Example 1 herein. Such nucleic acids are useful in performing the methods of the invention. The amino acid sequences given in Table A1 of Example 1 are example sequences of orthologues and paralogues of the bHLH6-like polypeptide represented by SEQ ID NO: 2, the terms “orthologues” and “paralogues” being as defined herein. Further orthologues and paralogues may readily be identified by performing a so-called reciprocal blast search. Typically, this involves a first BLAST involving BLASTing a query sequence (for example using any of the sequences listed in Table A1 of Example 1) against any sequence database, such as the publicly available NCBI database. BLASTN or TBLASTX (using standard default values) are generally used when starting from a nucleotide sequence, and BLASTP or TBLASTN (using standard default values) when starting from a protein sequence. The BLAST results may optionally be filtered. The full-length sequences of either the filtered results or non-filtered results are then BLASTed back (second BLAST) against sequences from the organism from which the query sequence is derived (where the query sequence is SEQ ID NO: 1 or SEQ ID NO: 2, the second BLAST would therefore be against Arabidopsis thaliana sequences). The results of the first and second BLASTs are then compared. A paralogue is identified if a high-ranking hit from the first blast is from the same species as from which the query sequence is derived, a BLAST back then ideally results in the query sequence amongst the highest hits; an orthologue is identified if a high-ranking hit in the first BLAST is not from the same species as from which the query sequence is derived, and preferably results upon BLAST back in the query sequence being among the highest hits.

[0160] High-ranking hits are those having a low E-value. The lower the E-value, the more significant the score (or in other words the lower the chance that the hit was found by chance). Computation of the E-value is well known in the art. In addition to E-values, comparisons are also scored by percentage identity. Percentage identity refers to the number of identical nucleotides (or amino acids) between the two compared nucleic acid (or polypeptide) sequences over a particular length. In the case of large families, ClustalW may be used, followed by a neighbour joining tree, to help visualize clustering of related genes and to identify orthologues and paralogues.

[0161] Nucleic acid variants may also be useful in practising the methods of the invention. Examples of such variants include nucleic acids encoding homologues and derivatives of any one of the amino acid sequences given in Table A1 of Example 1, the terms “homologue” and “derivative” being as defined herein. Also useful in the methods of the invention are nucleic acids encoding homologues and derivatives of orthologues or paralogues of any one of the amino acid sequences given in Table A1 of Example 1. Homologues and derivatives useful in the methods of the present invention have substantially the same biological and functional activity as the unmodified protein from which they are derived.

[0162] Further nucleic acid variants useful in practising the methods of the invention include portions of nucleic acids encoding bHLH6-like polypeptides, nucleic acids hybridising to nucleic acids encoding bHLH6-like polypeptides, splice variants of nucleic acids encoding bHLH6-like polypeptides, allelic variants of nucleic acids encoding bHLH6-like polypeptides and variants of nucleic acids encoding bHLH6-like polypeptides obtained by gene shuffling. The terms hybridising sequence, splice variant, allelic variant and gene shuffling are as described herein.

[0163] Nucleic acids encoding bHLH6-like polypeptides need not be full-length nucleic acids, since performance of the methods of the invention does not rely on the use of full-length nucleic acid sequences. According to the present invention, there is provided a method for enhancing yield-related traits in plants, comprising introducing and expressing in a plant a portion of any one of the nucleic acid sequences given in Table A1 of Example 1, or a portion of a nucleic acid encoding an orthologue, paralogue or homologue of any of the amino acid sequences given in Table A1 of Example 1.

[0164] A portion of a nucleic acid may be prepared, for example, by making one or more deletions to the nucleic acid. The portions may be used in isolated form or they may be fused to other coding (or non-coding) sequences in order to, for example, produce a protein that combines several activities. When fused to other coding sequences, the resultant polypeptide produced upon translation may be bigger than that predicted for the protein portion.

[0165] Portions useful in the methods of the invention, encode a bHLH6-like polypeptide as defined herein, and have substantially the same biological activity as the amino acid sequences given in Table A1 of Example 1. Preferably, the portion is a portion of any one of the nucleic acids given in Table A1 of Example 1, or is a portion of a nucleic acid encoding an orthologue or paralogue of any one of the amino acid sequences given in Table A1 of Example 1. Preferably the portion is at least 500, 600, 700, 800, 900, 1000, 1100, 1200; 1300, 1400, 1500, 1600, 1700, 1800, 1900, 2000, 2100, 2200 consecutive nucleotides in length, the consecutive nucleotides being of any one of the nucleic acid sequences given in Table A1 of Example 1, or of a nucleic acid encoding an orthologue or paralogue of any one of the amino acid sequences given in Table A1 of Example 1. Most preferably the portion is a portion of the nucleic acid of SEQ ID NO: 1. Preferably, the portion encodes a fragment of an amino acid sequence which, when used in the construction of a phylogenetic tree, such as the one depicted in FIG. 6 in Li et al. (2006), clusters within subgroup N (which comprises the amino acid sequence represented by SEQ ID NO: 2), rather than with any other group.

[0166] Another nucleic acid variant useful in the methods of the invention is a nucleic acid capable of hybridising, under reduced stringency conditions, preferably under stringent conditions, with a nucleic acid encoding a bHLH6-like polypeptide as defined herein, or with a portion as defined herein.

[0167] According to the present invention, there is provided a method for enhancing yield-related traits in plants, comprising introducing and expressing in a plant a nucleic acid capable of hybridizing to any one of the nucleic acids given in Table A1 of Example 1, or comprising introducing and expressing in a plant a nucleic acid capable of hybridising to a nucleic acid encoding an orthologue, paralogue or homologue of any of the nucleic acid sequences given in Table A1 of Example 1.

[0168] Hybridising sequences useful in the methods of the invention encode a bHLH6-like polypeptide as defined herein, having substantially the same biological activity as the amino acid sequences given in Table A1 of Example 1. Preferably, the hybridising sequence is capable of hybridising to any one of the nucleic acids given in Table A1 of Example 1, or to a portion of any of these sequences, a portion being as defined above, or the hybridising sequence is capable of hybridising to a nucleic acid encoding an orthologue or paralogue of any one of the amino acid sequences given in Table A1 of Example 1. Most preferably, the hybridising sequence is capable of hybridising to a nucleic acid as represented by SEQ ID NO: 1 or to a portion thereof.

[0169] Preferably, the hybridising sequence encodes a polypeptide with an amino acid sequence which, when full-length and used in the construction of a phylogenetic tree, such as the one depicted in FIG. 6 in Li et al. (2006), clusters within subgroup N (which comprises the amino acid sequence represented by SEQ ID NO: 2), rather than with any other group.

[0170] Another nucleic acid variant useful in the methods of the invention is a splice variant encoding a bHLH6-like polypeptide as defined hereinabove, a splice variant being as defined herein.

[0171] According to the present invention, there is provided a method for enhancing yield-related traits in plants, comprising introducing and expressing in a plant a splice variant of any one of the nucleic acid sequences given in Table A1 of Example 1, or a splice variant of a nucleic acid encoding an orthologue, paralogue or homologue of any of the amino acid sequences given in Table A1 of Example 1.

[0172] Preferred splice variants are splice variants of a nucleic acid represented by SEQ ID NO: 1, or a splice variant of a nucleic acid encoding an orthologue or paralogue of SEQ ID NO: 2. Preferably, the amino acid sequence encoded by the splice variant, when used in the construction of a phylogenetic tree, such as the one depicted in FIG. 6 in Li et al. (2006), clusters within subgroup N (which comprises the amino acid sequence represented by SEQ ID NO: 2), rather than with any other group.

[0173] Another nucleic acid variant useful in performing the methods of the invention is an allelic variant of a nucleic acid encoding a bHLH6-like polypeptide as defined hereinabove, an allelic variant being as defined herein.

[0174] According to the present invention, there is provided a method for enhancing yield-related traits in plants, comprising introducing and expressing in a plant an allelic variant of any one of the nucleic acids given in Table A1 of Example 1, or comprising introducing and expressing in a plant an allelic variant of a nucleic acid encoding an orthologue, paralogue or homologue of any of the amino acid sequences given in Table A1 of Example 1.

[0175] The polypeptides encoded by allelic variants useful in the methods of the present invention have substantially the same biological activity as the bHLH6-like polypeptide of SEQ ID NO: 2 and any of the amino acids depicted in Table A1 of Example 1. Allelic variants exist in nature, and encompassed within the methods of the present invention is the use of these natural alleles. Preferably, the allelic variant is an allelic variant of SEQ ID NO: 1 or an allelic variant of a nucleic acid encoding an orthologue or paralogue of SEQ ID NO: 2. Preferably, the amino acid sequence encoded by the allelic variant, when used in the construction of a phylogenetic tree, such as the one depicted in FIG. 6 in Li et al. (2006), clusters within subgroup N (which comprises the amino acid sequence represented by SEQ ID NO: 2), rather than with any other group.

[0176] Gene shuffling or directed evolution may also be used to generate variants of nucleic acids encoding bHLH6-like polypeptides as defined above; the term “gene shuffling” being as defined herein. An example of optimisation of bHLH proteins is provided by Pattanaik et al. (BBA1759, 308-318, 2006). This approach may be used for selecting optimised bHLH6-like proteins for use in enhancing yield related traits in plants.

[0177] According to the present invention, there is provided a method for enhancing yield-related traits in plants, comprising introducing and expressing in a plant a variant of any one of the nucleic acid sequences given in Table A1 of Example 1, or comprising introducing and expressing in a plant a variant of a nucleic acid encoding an orthologue, paralogue or homologue of any of the amino acid sequences given in Table A1 of Example 1, which variant nucleic acid is obtained by gene shuffling.

[0178] Preferably, the amino acid sequence encoded by the variant nucleic acid obtained by gene shuffling, when used in the construction of a phylogenetic tree such as the one depicted in FIG. 6 in Li et al. (2006), clusters within subgroup N (which comprises the amino acid sequence represented by SEQ ID NO: 2), rather than with any other group.

[0179] Furthermore, nucleic acid variants may also be obtained by site-directed mutagenesis. Several methods are available to achieve site-directed mutagenesis, the most common being PCR based methods (Current Protocols in Molecular Biology. Wiley Eds.).

[0180] Nucleic acids encoding bHLH6-like polypeptides may be derived from any natural or artificial source. The nucleic acid may be modified from its native form in composition and/or genomic environment through deliberate human manipulation. Preferably the bHLH6-like polypeptide-encoding nucleic acid is from a plant, further preferably from a dicotyledonous plant, more preferably from the family Brassicaceae, most preferably the nucleic acid is from Arabidopsis thaliana.

[0181] Performance of the methods of the invention gives plants having enhanced yield-related traits. In particular performance of the methods of the invention gives plants having increased yield, especially increased seed yield relative to control plants. The terms “yield” and “seed yield” are described in more detail in the “definitions” section herein.

[0182] Reference herein to enhanced yield-related traits is taken to mean an increase in biomass (weight) of one or more parts of a plant, which may include aboveground (harvestable) parts and/or (harvestable) parts below ground. In particular, such harvestable parts are seeds, and performance of the methods of the invention results in plants having increased seed yield relative to the seed yield of control plants. It should be noted that the enhanced yield related traits do not encompass increased resistance to osmotic stress, increased oxidative stress resistance or increased resistance to insects.

[0183] Taking corn as an example, a yield increase may be manifested as one or more of the following: increase in the number of plants established per square meter, an increase in the number of ears per plant, an increase in the number of rows, number of kernels per row, kernel weight, thousand kernel weight, ear length/diameter, increase in the seed filling rate (which is the number of filled seeds divided by the total number of seeds and multiplied by 100), among others. Taking rice as an example, a yield increase may manifest itself as an increase in one or more of the following: number of plants per square meter, number of panicles per plant, number of spikelets per panicle, number of flowers (florets) per panicle (which is expressed as a ratio of the number of filled seeds over the number of primary panicles), increase in the seed filling rate (which is the number of filled seeds divided by the total number of seeds and multiplied by 100), increase in thousand kernel weight, among others.

[0184] The present invention provides a method for increasing yield, especially seed yield of plants, relative to control plants, which method comprises modulating expression in a plant of a nucleic acid encoding a bHLH6-like polypeptide as defined herein.

[0185] Since the transgenic plants according to the present invention have increased yield, it is likely that these plants exhibit an increased growth rate (during at least part of their life cycle), relative to the growth rate of control plants at a corresponding stage in their life cycle.

[0186] The increased growth rate may be specific to one or more parts of a plant (including seeds), or may be throughout substantially the whole plant. Plants having an increased growth rate may have a shorter life cycle. The life cycle of a plant may be taken to mean the time needed to grow from a dry mature seed up to the stage where the plant has produced dry mature seeds, similar to the starting material. This life cycle may be influenced by factors such as early vigour, growth rate, greenness index, flowering time and speed of seed maturation. The increase in growth rate may take place at one or more stages in the life cycle of a plant or during substantially the whole plant life cycle. Increased growth rate during the early stages in the life cycle of a plant may reflect enhanced vigour. The increase in growth rate may alter the harvest cycle of a plant allowing plants to be sown later and/or harvested sooner than would otherwise be possible (a similar effect may be obtained with earlier flowering time). If the growth rate is sufficiently increased, it may allow for the further sowing of seeds of the same plant species (for example sowing and harvesting of rice plants followed by sowing and harvesting of further rice plants all within one conventional growing period). Similarly, if the growth rate is sufficiently increased, it may allow for the further sowing of seeds of different plants species (for example the sowing and harvesting of corn plants followed by, for example, the sowing and optional harvesting of soybean, potato or any other suitable plant). Harvesting additional times from the same rootstock in the case of some crop plants may also be possible. Altering the harvest cycle of a plant may lead to an increase in annual biomass production per square meter (due to an increase in the number of times (say in a year) that any particular plant may be grown and harvested). An increase in growth rate may also allow for the cultivation of transgenic plants in a wider geographical area than their wild-type counterparts, since the territorial limitations for growing a crop are often determined by adverse environmental conditions either at the time of planting (early season) or at the time of harvesting (late season). Such adverse conditions may be avoided if the harvest cycle is shortened. The growth rate may be determined by deriving various parameters from growth curves, such parameters may be: T-Mid (the time taken for plants to reach 50% of their maximal size) and T-90 (time taken for plants to reach 90% of their maximal size), amongst others.

[0187] According to a preferred feature of the present invention, performance of the methods of the invention gives plants having an increased growth rate relative to control plants. Therefore, according to the present invention, there is provided a method for increasing the growth rate of plants, which method comprises modulating expression in a plant of a nucleic acid encoding a bHLH6-like polypeptide as defined herein.

[0188] An increase in yield and/or growth rate occurs whether the plant is under non-stress conditions or whether the plant is exposed to various stresses compared to control plants. Plants typically respond to exposure to stress by growing more slowly. In conditions of severe stress, the plant may even stop growing altogether. Mild stress on the other hand is defined herein as being any stress to which a plant is exposed which does not result in the plant ceasing to grow altogether without the capacity to resume growth. Mild stress in the sense of the invention leads to a reduction in the growth of the stressed plants of less than 40%, 35% or 30%, preferably less than 25%, 20% or 15%, more preferably less than 14%, 13%, 12%, 11% or 10% or less in comparison to the control plant under non-stress conditions. Due to advances in agricultural practices (irrigation, fertilization, pesticide treatments) severe stresses are not often encountered in cultivated crop plants. As a consequence, the compromised growth induced by mild stress is often an undesirable feature for agriculture. Mild stresses are the everyday biotic and/or abiotic (environmental) stresses to which a plant is exposed. Abiotic stresses may be due to drought or excess water, anaerobic stress, salt stress, chemical toxicity, oxidative stress and hot, cold or freezing temperatures. The abiotic stress may be an osmotic stress caused by a water stress (particularly due to drought), salt stress, oxidative stress or an ionic stress. Biotic stresses are typically those stresses caused by pathogens, such as bacteria, viruses, fungi, nematodes and insects.

[0189] In particular, the methods of the present invention may be performed under non-stress conditions or under conditions of mild drought to give plants having increased yield relative to control plants. As reported in Wang et al. (Planta (2003) 218: 1-14), abiotic stress leads to a series of morphological, physiological, biochemical and molecular changes that adversely affect plant growth and productivity. Drought, salinity, extreme temperatures and oxidative stress are known to be interconnected and may induce growth and cellular damage through similar mechanisms. Rabbani et al. (Plant Physiol (2003) 133: 1755-1767) describes a particularly high degree of “cross talk” between drought stress and high-salinity stress. For example, drought and/or salinisation are manifested primarily as osmotic stress, resulting in the disruption of homeostasis and ion distribution in the cell. Oxidative stress, which frequently accompanies high or low temperature, salinity or drought stress, may cause denaturing of functional and structural proteins. As a consequence, these diverse environmental stresses often activate similar cell signalling pathways and cellular responses, such as the production of stress proteins, up-regulation of anti-oxidants, accumulation of compatible solutes and growth arrest. The term “non-stress” conditions as used herein are those environmental conditions that allow optimal growth of plants. Persons skilled in the art are aware of normal soil conditions and climatic conditions for a given location.

[0190] Performance of the methods of the invention gives plants grown under non-stress conditions or under mild drought conditions increased yield relative to control plants grown under comparable conditions. Therefore, according to the present invention, there is provided a method for increasing yield in plants grown under non-stress conditions or under mild drought conditions, which method comprises modulating expression in a plant of a nucleic acid encoding a bHLH6-like polypeptide.

[0191] Performance of the methods of the invention gives plants grown under conditions of nutrient deficiency, particularly under conditions of nitrogen deficiency, increased yield relative to control plants grown under comparable conditions. Therefore, according to the present invention, there is provided a method for increasing yield in plants grown under conditions of nutrient deficiency, which method comprises modulating expression in a plant of a nucleic acid encoding a bHLH6-like polypeptide. Nutrient deficiency may result from a lack of nutrients such as nitrogen, phosphates and other phosphorous-containing compounds, potassium, calcium, cadmium, magnesium, manganese, iron and boron, amongst others.

[0192] The present invention encompasses plants or parts thereof (including seeds) obtainable by the methods according to the present invention. The plants or parts thereof comprise a nucleic acid transgene encoding a bHLH6-like polypeptide as defined above.

[0193] The invention also provides genetic constructs and vectors to facilitate introduction and/or expression in plants of nucleic acids encoding bHLH6-like polypeptides. The gene constructs may be inserted into vectors, which may be commercially available, suitable for transforming into plants and suitable for expression of the gene of interest in the transformed cells. The invention also provides use of a gene construct as defined herein in the methods of the invention.

[0194] More specifically, the present invention provides a construct comprising:
[0195] (a) a nucleic acid encoding a bHLH6-like polypeptide as defined above;
[0196] (b) one or more control sequences capable of driving expression of the nucleic acid sequence of (a); and optionally
[0197] (c) a transcription termination sequence.

[0198] Preferably, the nucleic acid encoding a bHLH6-like polypeptide is as defined above. The term “control sequence” and “termination sequence” are as defined herein.

[0199] Plants are transformed with a vector comprising any of the nucleic acids described above. The skilled artisan is well aware of the genetic elements that must be present on the vector in order to successfully transform, select and propagate host cells containing the sequence of interest. The sequence of interest is operably linked to one or more control sequences (at least to a promoter).

[0200] Advantageously, any type of promoter, whether natural or synthetic, may be used to drive expression of the nucleic acid sequence. A constitutive promoter of plant origin is particularly useful in the methods. Preferably the constitutive promoter is also a ubiquitous promoter. See the “Definitions” section herein for definitions of the various promoter types. Preferably, the plant constitutive promoter is a medium strength promoter and is less strong than the CaMV 35S promoter.

[0201] It should be clear that the applicability of the present invention is not restricted to the bHLH6-like polypeptide-encoding nucleic acid represented by SEQ ID NO: 1, nor is the applicability of the invention restricted to expression of a bHLH6-like polypeptide-encoding nucleic acid when driven by a constitutive promoter.

[0202] The constitutive promoter is preferably a GOS2 promoter, preferably a GOS2 promoter from rice. Further preferably the constitutive promoter is represented by a nucleic acid sequence substantially similar to SEQ ID NO: 12, most preferably the constitutive promoter is as represented by SEQ ID NO: 12. See Table 2a in the “Definitions” section herein for further examples of constitutive promoters.

[0203] Optionally, one or more terminator sequences may be used in the construct introduced into a plant. Preferably, the construct comprises an expression cassette essentially similar or identical to SEQ ID NO 56, comprising the GOS2 promoter and the nucleic acid encoding the bHLH6-like polypeptide.

[0204] Additional regulatory elements may include transcriptional as well as translational enhancers. Those skilled in the art will be aware of terminator and enhancer sequences that may be suitable for use in performing the invention. An intron sequence may also be added to the 5′ untranslated region (UTR) or in the coding sequence to increase the amount of the mature message that accumulates in the cytosol, as described in the definitions section. Other control sequences (besides promoter, enhancer, silencer, intron sequences, 3′UTR and/or 5′UTR regions) may be protein and/or RNA stabilizing elements. Such sequences would be known or may readily be obtained by a person skilled in the art.

[0205] The genetic constructs of the invention may further include an origin of replication sequence that is required for maintenance and/or replication in a specific cell type. One example is when a genetic construct is required to be maintained in a bacterial cell as an episomal genetic element (e.g. plasmid or cosmid molecule). Preferred origins of replication include, but are not limited to, the f1-ori and colE1.

[0206] For the detection of the successful transfer of the nucleic acid sequences as used in the methods of the invention and/or selection of transgenic plants comprising these nucleic acids, it is advantageous to use marker genes (or reporter genes). Therefore, the genetic construct may optionally comprise a selectable marker gene. Selectable markers are described in more detail in the “definitions” section herein. The marker genes may be removed or excised from the transgenic cell once they are no longer needed. Techniques for marker removal are known in the art, useful techniques are described above in the definitions section.

[0207] The invention also provides a method for the production of transgenic plants having enhanced yield-related traits relative to control plants, comprising introduction and expression in a plant of any nucleic acid encoding a bHLH6-like polypeptide as defined hereinabove.

[0208] More specifically, the present invention provides a method for the production of transgenic plants having increased enhanced yield-related traits, particularly increased emergence vigour and/or seed yield, which method comprises:
[0209] (i) introducing and expressing in a plant or plant cell a bHLH6-like polypeptide-encoding nucleic acid; and
[0210] (ii) cultivating the plant cell under conditions promoting plant growth and development.

[0211] The nucleic acid of (i) may be any of the nucleic acids capable of encoding a bHLH6-like polypeptide as defined herein.

[0212] The nucleic acid may be introduced directly into a plant cell or into the plant itself (including introduction into a tissue, organ or any other part of a plant). According to a preferred feature of the present invention, the nucleic acid is preferably introduced into a plant by transformation. The term “transformation” is described in more detail in the “definitions” section herein.

[0213] The genetically modified plant cells can be regenerated via all methods with which the skilled worker is familiar. Suitable methods can be found in the abovementioned publications by S. D. Kung and R. Wu, Potrykus or Hagen and Willmitzer.

[0214] Generally after transformation, plant cells or cell groupings are selected for the presence of one or more markers which are encoded by plant-expressible genes co-transferred with the gene of interest, following which the transformed material is regenerated into a whole plant. To select transformed plants, the plant material obtained in the transformation is, as a rule, subjected to selective conditions so that transformed plants can be distinguished from untransformed plants. For example, the seeds obtained in the above-described manner can be planted and, after an initial growing period, subjected to a suitable selection by spraying. A further possibility consists in growing the seeds, if appropriate after sterilization, on agar plates using a suitable selection agent so that only the transformed seeds can grow into plants. Alternatively, the transformed plants are screened for the presence of a selectable marker such as the ones described above.

[0215] Following DNA transfer and regeneration, putatively transformed plants may also be evaluated, for instance using Southern analysis, for the presence of the gene of interest, copy number and/or genomic organisation. Alternatively or additionally, expression levels of the newly introduced DNA may be monitored using Northern and/or Western analysis, both techniques being well known to persons having ordinary skill in the art.

[0216] The generated transformed plants may be propagated by a variety of means, such as by clonal propagation or classical breeding techniques. For example, a first generation (or T1) transformed plant may be selfed and homozygous second-generation (or T2) transformants selected, and the T2 plants may then further be propagated through classical breeding techniques. The generated transformed organisms may take a variety of forms. For example, they may be chimeras of transformed cells and non-transformed cells; clonal transformants (e.g., all cells transformed to contain the expression cassette); grafts of transformed and untransformed tissues (e.g., in plants, a transformed rootstock grafted to an untransformed scion).

[0217] The present invention clearly extends to any plant cell or plant produced by any of the methods described herein, and to all plant parts and propagules thereof. The present invention extends further to encompass the progeny of a primary transformed or transfected cell, tissue, organ or whole plant that has been produced by any of the aforementioned methods, the only requirement being that progeny exhibit the same genotypic and/or phenotypic characteristic(s) as those produced by the parent in the methods according to the invention.

[0218] The invention also includes host cells containing an isolated nucleic acid encoding a bHLH6-like polypeptide as defined hereinabove. Preferred host cells according to the invention are plant cells. Host plants for the nucleic acids or the vector used in the method according to the invention, the expression cassette or construct or vector are, in principle, advantageously all plants, which are capable of synthesizing the polypeptides used in the inventive method.

[0219] The methods of the invention are advantageously applicable to any plant. Plants that are particularly useful in the methods of the invention include all plants which belong to the superfamily Viridiplantae, in particular monocotyledonous and dicotyledonous plants including fodder or forage legumes, ornamental plants, food crops, trees or shrubs. According to a preferred embodiment of the present invention, the plant is a crop plant. Examples of crop plants include soybean, sunflower, canola, alfalfa, rapeseed, linseed, cotton, tomato, potato and tobacco. Further preferably, the plant is a monocotyledonous plant. Examples of monocotyledonous plants include sugarcane. More preferably the plant is a cereal. Examples of cereals include rice, maize, wheat, barley, millet, rye, triticale, sorghum, emmer, spelt, secale, einkorn, teff, milo and oats.

[0220] The invention also extends to harvestable parts of a plant such as, but not limited to seeds, leaves, fruits, flowers, stems, roots, rhizomes, tubers and bulbs. The invention furthermore relates to products derived, preferably directly derived, from a harvestable part of such a plant, such as dry pellets or powders, oil, fat and fatty acids, starch or proteins.

[0221] According to a preferred feature of the invention, the modulated expression is increased expression. Methods for increasing expression of nucleic acids or genes, or gene products, are well documented in the art and examples are provided in the definitions section.

[0222] As mentioned above, a preferred method for modulating expression of a nucleic acid encoding a bHLH6-like polypeptide is by introducing and expressing in a plant a nucleic acid encoding a bHLH6-like polypeptide; however the effects of performing the method, i.e. enhancing yield-related traits may also be achieved using other well known techniques, including but not limited to T-DNA activation tagging, TILLING, homologous recombination. A description of these techniques is provided in the definitions section.

[0223] The present invention also encompasses use of nucleic acids encoding bHLH6-like polypeptides as described herein and use of these bHLH6-like polypeptides in enhancing any of the aforementioned yield-related traits in plants.

[0224] Nucleic acids encoding bHLH6-like polypeptide described herein, or the bHLH6-like polypeptides themselves, may find use in breeding programmes in which a DNA marker is identified which may be genetically linked to a bHLH6-like polypeptide-encoding gene. The nucleic acids/genes, or the bHLH6-like polypeptides themselves may be used to define a molecular marker. This DNA or protein marker may then be used in breeding programmes to select plants having enhanced yield-related traits as defined hereinabove in the methods of the invention.

[0225] Allelic variants of a bHLH6-like polypeptide-encoding nucleic acid/gene may also find use in marker-assisted breeding programmes. Such breeding programmes sometimes require introduction of allelic variation by mutagenic treatment of the plants, using for example EMS mutagenesis; alternatively, the programme may start with a collection of allelic variants of so called “natural” origin caused unintentionally. Identification of allelic variants then takes place, for example, by PCR. This is followed by a step for selection of superior allelic variants of the sequence in question and which give increased yield. Selection is typically carried out by monitoring growth performance of plants containing different allelic variants of the sequence in question. Growth performance may be monitored in a greenhouse or in the field. Further optional steps include crossing plants in which the superior allelic variant was identified with another plant. This could be used, for example, to make a combination of interesting phenotypic features.

[0226] Nucleic acids encoding bHLH6-like polypeptides may also be used as probes for genetically and physically mapping the genes that they are a part of, and as markers for traits linked to those genes. Such information may be useful in plant breeding in order to develop lines with desired phenotypes. Such use of bHLH6-like polypeptide-encoding nucleic acids requires only a nucleic acid sequence of at least 15 nucleotides in length. The bHLH6-like polypeptide-encoding nucleic acids may be used as restriction fragment length polymorphism (RFLP) markers. Southern blots (Sambrook J, Fritsch E F and Maniatis T (1989) Molecular Cloning, A Laboratory Manual) of restriction-digested plant genomic DNA may be probed with the bHLH6-like-encoding nucleic acids. The resulting banding patterns may then be subjected to genetic analyses using computer programs such as MapMaker (Lander et al. (1987) Genomics 1: 174-181) in order to construct a genetic map. In addition, the nucleic acids may be used to probe Southern blots containing restriction endonuclease-treated genomic DNAs of a set of individuals representing parent and progeny of a defined genetic cross. Segregation of the DNA polymorphisms is noted and used to calculate the position of the bHLH6-like polypeptide-encoding nucleic acid in the genetic map previously obtained using this population (Botstein et al. (1980) Am. J. Hum. Genet. 32:314-331).

[0227] The production and use of plant gene-derived probes for use in genetic mapping is described in Bernatzky and Tanksley (1986) Plant Mol. Biol. Reporter 4: 37-41. Numerous publications describe genetic mapping of specific cDNA clones using the methodology outlined above or variations thereof. For example, F2 intercross populations, backcross populations, randomly mated populations, near isogenic lines, and other sets of individuals may be used for mapping. Such methodologies are well known to those skilled in the art.

[0228] The nucleic acid probes may also be used for physical mapping (i.e., placement of sequences on physical maps; see Hoheisel et al. In: Non-mammalian Genomic Analysis: A Practical Guide, Academic press 1996, pp. 319-346, and references cited therein).

[0229] In another embodiment, the nucleic acid probes may be used in direct fluorescence in situ hybridisation (FISH) mapping (Trask (1991) Trends Genet. 7:149-154). Although current methods of FISH mapping favour use of large clones (several kb to several hundred kb; see Laan et al. (1995) Genome Res. 5:13-20), improvements in sensitivity may allow performance of FISH mapping using shorter probes.

[0230] A variety of nucleic acid amplification-based methods for genetic and physical mapping may be carried out using the nucleic acids. Examples include allele-specific amplification (Kazazian (1989) J. Lab. Clin. Med 11:95-96), polymorphism of PCR-amplified fragments (CAPS; Sheffield et al. (1993) Genomics 16:325-332), allele-specific ligation (Landegren et al. (1988) Science 241:1077-1080), nucleotide extension reactions (Sokolov (1990) Nucleic Acid Res. 18:3671), Radiation Hybrid Mapping (Walter et al. (1997) Nat. Genet. 7:22-28) and Happy Mapping (Dear and Cook (1989) Nucleic Acid Res. 17:6795-6807). For these methods, the sequence of a nucleic acid is used to design and produce primer pairs for use in the amplification reaction or in primer extension reactions. The design of such primers is well known to those skilled in the art. In methods employing PCR-based genetic mapping, it may be necessary to identify DNA sequence differences between the parents of the mapping cross in the region corresponding to the instant nucleic acid sequence. This, however, is generally not necessary for mapping methods.

[0231] The methods according to the present invention result in plants having enhanced yield-related traits, as described hereinbefore. These traits may also be combined with other economically advantageous traits, such as further yield-enhancing traits, tolerance to other abiotic and biotic stresses, traits modifying various architectural features and/or biochemical and/or physiological features.

[0232] In one embodiment the invention relates to subject mater summarized as follows:

Item 1: A method for enhancing yield-related traits in plants relative to control plants, comprising modulating expression in a plant of a nucleic acid encoding a bHLH6-like polypeptide, wherein said bHLH6-like polypeptide comprises a HLH domain.
Item 2: A method according to item 1, wherein said bHLH6-like polypeptide comprises one or more of the following motifs:
[0233] Motif 1 (SEQ ID NO: 3),
[0234] Motif 2 (SEQ ID NO: 4),
[0235] Motif 3: (SEQ ID NO: 5)
[0236] Motif 7 (SEQ ID NO: 9) or a sequence that has at least 80% sequence identity to SEQ ID NO: 9.
   Item 3: Method according to item 1 or 2, wherein said modulated expression is effected by introducing and expressing in a plant a nucleic acid encoding a bHLH6-like polypeptide.
   Item 4: Method according to any preceding claim, wherein said nucleic acid encoding a bHLH6-like polypeptide encodes any one of the proteins listed in Table A1 or is a portion of such a nucleic acid, or a nucleic acid capable of hybridising with such a nucleic acid.
   Item 5: Method according to any preceding claim, wherein said nucleic acid sequence encodes an orthologue or paralogue of any of the proteins given in Table A1.
   Item 6: Method according to any preceding claim, wherein said enhanced yield-related traits comprise increased yield, preferably increased emergence vigour and/or increased seed yield relative to control plants.
   Item 7: Method according to any one of items 1 to 6, wherein said enhanced yield-related traits are obtained under non-stress conditions.
   Item 8: Method according to any one of items 3 to 7, wherein said nucleic acid is operably linked to a constitutive promoter, preferably to a GOS2 promoter, most preferably to a GOS2 promoter from rice.
   Item 9: Method according to any preceding item, wherein said nucleic acid encoding a bHLH6-like polypeptide is of plant origin, preferably from a dicotyledonous plant, further preferably from the family Brassicaceae, more preferably from the genus Arabidopsis, most preferably from Arabidopsis thaliana.

[0237] Item 10: Plant or part thereof, including seeds, obtainable by a method according to any preceding item, wherein said plant or part thereof comprises a recombinant nucleic acid encoding a bHLH6-like polypeptide.

Item 11: Construct comprising:
[0238] (a) nucleic acid encoding a bHLH6-like polypeptide as defined in items 1 or 2;
[0239] (b) one or more control sequences capable of driving expression of the nucleic acid sequence of (a); and optionally
[0240] (c) a transcription termination sequence.
   Item 12: Construct according to item 11, wherein one of said control sequences is a constitutive promoter, preferably a GOS2 promoter, most preferably a GOS2 promoter from rice.
   Item 13: Use of a construct according to item 11 or 12 in a method for making plants having increased yield, particularly increased emergence vigour and/or increased seed yield relative to control plants.
   Item 14: Plant, plant part or plant cell transformed with a construct according to item 10 or 11.
   Item 15: Method for the production of a transgenic plant having increased yield, particularly increased biomass and/or increased seed yield relative to control plants, comprising:
[0241] (i) introducing and expressing in a plant a nucleic acid encoding a bHLH6-like polypeptide as defined in item 1 or 2; and
[0242] (ii) cultivating the plant cell under conditions promoting plant growth and development.
   Item 16: Transgenic plant having increased yield, particularly increased biomass and/or increased seed yield, relative to control plants, resulting from modulated expression of a nucleic acid encoding a bHLH6-like polypeptide as defined in item 1 or 2, or a transgenic plant cell derived from said transgenic plant.
   Item 17: Transgenic plant according to item 10, 14 or 16, or a transgenic plant cell derived thereof, wherein said plant is a crop plant or a monocot or a cereal, such as rice, maize, wheat, barley, millet, rye, triticale, sorghum emmer, spelt, secale, einkorn, teff, milo and oats.
   Item 18: Harvestable parts of a plant according to item 17, wherein said harvestable parts are preferably shoot biomass and/or seeds.
   Item 19: Products derived from a plant according to item 17 and/or from harvestable parts of a plant according to item 19.
   Item 20: Use of a nucleic acid encoding a bHLH6-like polypeptide in increasing yield, particularly in increasing seed yield and/or shoot biomass in plants, relative to control plants.

[0243] In another embodiment of the invention it has now been found that modulating expression in a plant of a nucleic acid sequence encoding a GRP polypeptide, wherein said GRP polypeptide is an RrmJ/FtsJ ribosomal RNA methyltransferase polypeptide, gives plants having enhanced yield-related traits relative to control plants. According to a first embodiment, the present invention provides a method for enhancing yield-related traits in plants relative to control plants, comprising modulating expression in a plant of a nucleic acid sequence encoding a GRP polypeptide, wherein said GRP polypeptide is an RrmJ/FtsJ ribosomal RNA methyltransferase polypeptide (RrmJ/FtsJ polypeptide).

[0244] A preferred method for modulating (preferably, increasing) expression of a nucleic acid sequence encoding a GRP polypeptide is by introducing and expressing in a plant a nucleic acid sequence encoding a GRP polypeptide.

[0245] In one embodiment any reference hereinafter to a “protein useful in the methods of the invention” is taken to mean a GRP polypeptide as defined herein. In the same embodiment any reference hereinafter to a “nucleic acid useful in the methods of the invention” is taken to mean a nucleic acid sequence capable of encoding such a GRP polypeptide. In one embodiment the nucleic acid sequence to be introduced into a plant (and therefore useful in performing the methods of the invention) is any nucleic acid sequence encoding the type of protein which will now be described, hereafter also named “GRP nucleic acid” or “GRP gene”.

[0246] In one embodiment a “GRP polypeptide” as defined herein refers the proteins represented by SEQ ID NO: 58, by SEQ ID NO: 60, and to homologues (orthologues and paralogues) thereof. Table A2 of Example 1 herein presents such orthologues and paralogues.

[0247] Preferably, the homologues of SEQ ID NO: 58 or of SEQ ID NO: 60 have a ribosomal RNA methyltransferase RrmJ/FtsJ domain (InterPro entries IPR002877 and IPR015507; Pfam entry PF01728; PANTHER entry PTHR10920).

[0248] Alternatively or additionally, a “GRP polypeptide” as defined herein refers to any polypeptide having in increasing order of preference at least 50%, 55%, 60%, 65%, 70%, 75%, 80%, 85%, 90%, 95%, 98%, 99% or more polypeptide sequence identity to the GRP polypeptide as represented by SEQ ID NO: 58, or by SEQ ID NO: 60, or to any of the polypeptide sequences given in Table A2 of Example 1 herein.

[0249] In one embodiment the methods of the present invention make use of a partial GRP polypeptide, wherein the GRP polypeptide is an RrmJ/FtsJ polypeptide. GRP polypeptides may be identified by the presence of one or more of several well-known features (see above). Upon identification of a GRP polypeptide, a person skilled in the art could easily derive, using routine techniques, a corresponding partial GRP-encoding nucleic acid sequence useful in performing the methods of the invention.

[0250] The term “domain” and “motif” is defined in the “definitions” section herein. Specialist databases exist for the identification of domains, for example, SMART (Schultz et al. (1998) Proc. Natl. Acad. Sci. USA 95, 5857-5864; Letunic et al. (2002) Nucleic Acids Res 30, 242-244), InterPro (Mulder et al., (2003) Nucl. Acids. Res. 31, 315-318), Prosite (Bucher and Bairoch (1994), A generalized profile syntax for biomolecular sequences motifs and its function in automatic sequence interpretation. (In) ISMB-94; Proceedings 2nd International Conference on Intelligent Systems for Molecular Biology. Altman R., Brutlag D., Karp P., Lathrop R., Searls D., Eds., pp 53-61, AAAI Press, Menlo Park; Hulo et al., Nucl. Acids. Res. 32:D134-D137, (2004) ), or Pfam (Bateman et al., Nucleic Acids Research 30(1): 276-280 (2002) ). A set of tools for in silico analysis of protein sequences is available on the ExPASy proteomics server (Swiss Institute of Bioinformatics (Gasteiger et al., ExPASy: the proteomics server for in-depth protein knowledge and analysis, Nucleic Acids Res. 31:3784-3788 (2003) ). Domains or motifs may also be identified using routine techniques, such as by sequence alignment.

[0251] Methods for the alignment of sequences for comparison are well known in the art, such methods include GAP, BESTFIT, BLAST, FASTA and TFASTA. GAP uses the algorithm of Needleman and Wunsch ((1970) J Mol Biol 48: 443-453) to find the global (i.e. spanning the complete sequences) alignment of two sequences that maximizes the number of matches and minimizes the number of gaps. The BLAST algorithm (Altschul et al. (1990) J Mol Biol 215: 403-10) calculates percent sequence identity and performs a statistical analysis of the similarity between the two sequences. The software for performing BLAST analysis is publicly available through the National Centre for Biotechnology Information (NCBI). Homologues may readily be identified using, for example, the ClustalW multiple sequence alignment algorithm (version 1.83), with the default pairwise alignment parameters, and a scoring method in percentage. Global percentages of similarity and identity may also be determined using one of the methods available in the MatGAT software package (Campanella et al., BMC Bioinformatics. 2003 Jul. 10; 4:29. MatGAT: an application that generates similarity/identity matrices using protein or DNA sequences). Minor manual editing may be performed to optimise alignment between conserved motifs, as would be apparent to a person skilled in the art. Furthermore, instead of using full-length sequences for the identification of homologues, specific domains may also be used. The sequence identity values may be determined over the entire nucleic acid sequence or polypeptide sequence or over selected domains or conserved motif(s), using the programs mentioned above using the default parameters.

[0252] Furthermore, GRP polypeptides, as far as SEQ ID NO: 58, SEQ ID NO: 60, and its homologues are concerned, typically have the capability to methylate 23 S ribosomal RNA at position U2552 in the aminoacyl (A)1-site of the ribosome, only when the 23 S rRNA is present in 50 S ribosomal subunits. Tools and techniques for assaying the rRNA methyltransferase activity are well known in the art, for example in Hager et al. (2004) J Bacteriol 186(19): 6634-6642.

[0253] The present invention is illustrated by transforming plants with the nucleic acid sequence represented by SEQ ID NO: 57, encoding the polypeptide sequence of SEQ ID NO: 58. However, performance of the invention is not restricted to these sequences; the methods of the invention may advantageously be performed using any GRP-encoding nucleic acid sequence or GRP polypeptide as defined herein.

[0254] Examples of nucleic acids encoding GRP polypeptides may be found in databases known in the art. Such nucleic acids are useful in performing the methods of the invention. Orthologues and paralogues, the terms “orthologues” and “paralogues” being as defined herein, may readily be identified by performing a so-called reciprocal blast search. Typically, this involves a first BLAST involving BLASTing a query sequence (for example using SEQ ID NO: 58 or SEQ ID NO: 60) against any sequence database, such as the publicly available NCBI database. BLASTN or TBLASTX (using standard default values) are generally used when starting from a nucleotide sequence, and BLASTP or TBLASTN (using standard default values) when starting from a protein sequence. The BLAST results may optionally be filtered. The full-length sequences of either the filtered results or non-filtered results are then BLASTed back (second BLAST) against sequences from the organism from which the query sequence is derived (where the query sequence is SEQ ID NO: 57, SEQ ID NO: 58, SEQ ID NO: 59, or SEQ ID NO: 60, the second BLAST would therefore be against Nicotiana tabacum sequences). The results of the first and second BLASTs are then compared. A paralogue is identified if a high-ranking hit from the first blast is from the same species as from which the query sequence is derived, a BLAST back then ideally results in the query sequence amongst the highest hits; an orthologue is identified if a high-ranking hit in the first BLAST is not from the same species as from which the query sequence is derived, and preferably results upon BLAST back in the query sequence being among the highest hits.

[0255] High-ranking hits are those having a low E-value. The lower the E-value, the more significant the score (or in other words the lower the chance that the hit was found by chance). Computation of the E-value is well known in the art. In addition to E-values, comparisons are also scored by percentage identity. Percentage identity refers to the number of identical nucleotides (or amino acids) between the two compared nucleic acid sequence (or polypeptide) sequences over a particular length. In the case of large families, ClustalW may be used, followed by a neighbour joining tree, to help visualize clustering of related genes and to identify orthologues and paralogues.

[0256] Nucleic acid variants encoding homologues and derivatives of SEQ ID NO: 58 or of SEQ ID NO: 60, may also be useful in practising the methods of the invention, the terms “homologue” and “derivative” being as defined herein. Also useful in the methods of the invention are nucleic acids encoding homologues and derivatives of orthologues or paralogues of SEQ ID NO: 58 or of SEQ ID NO: 60. Homologues and derivatives useful in the methods of the present invention have substantially the same biological and functional activity as the unmodified protein from which they are derived.

[0257] Further nucleic acid sequence variants useful in practising the methods of the invention include portions of nucleic acids encoding GRP polypeptides, nucleic acids hybridising to nucleic acids encoding GRP polypeptides, splice variants of nucleic acids encoding GRP polypeptides, allelic variants of nucleic acids encoding GRP polypeptides and variants of nucleic acids encoding GRP polypeptides obtained by gene shuffling. The terms hybridising sequence, splice variant, allelic variant and gene shuffling are as described herein.

[0258] Nucleic acids encoding GRP polypeptides need not be full-length nucleic acids, since performance of the methods of the invention does not rely on the use of full-length nucleic acid sequences. According to the present invention, there is provided a method for enhancing yield-related traits in plants, comprising introducing and expressing in a plant a portion of SEQ ID NO: 57, or a portion of SEQ ID NO: 59, or a portion of a nucleic acid sequence encoding an orthologue, paralogue or homologue of SEQ ID NO: 60.

[0259] A portion of a nucleic acid sequence may be prepared, for example, by making one or more deletions to the nucleic acid. The portions may be used in isolated form or they may be fused to other coding (or non-coding) sequences in order to, for example, produce a protein that combines several activities. When fused to other coding sequences, the resultant polypeptide produced upon translation may be bigger than that predicted for the protein portion.

[0260] Portions useful in the methods of the invention, encode a GRP polypeptide as defined herein, and have substantially the same biological activity as the polypeptide sequences given in SEQ ID NO: 58 or of SEQ ID NO: 60. Preferably, the portion is a portion of the nucleic acid given in SEQ ID NO: 57 or SEQ ID NO: 59, or is a portion of a nucleic acid sequence encoding an orthologue or paralogue of the polypeptide sequences given in SEQ ID NO: 58 or of SEQ ID NO: 60. Preferably the portion is at least 400, 450, 500, 550, 600, 650, 700, 750 consecutive nucleotides in length, the consecutive nucleotides being of SEQ ID NO: 57 or of SEQ ID NO: 59, or of a nucleic acid sequence encoding an orthologue or paralogue of SEQ ID NO: 58 or of SEQ ID NO: 60. Most preferably the portion is a portion of the nucleic acid sequence of SEQ ID NO: 57 or of SEQ ID NO: 59.

[0261] Another nucleic acid sequence variant useful in the methods of the invention is a nucleic acid sequence capable of hybridising, under reduced stringency conditions, preferably under stringent conditions, with a nucleic acid sequence encoding a GRP polypeptide as defined herein, or with a portion as defined herein.

[0262] According to the present invention, there is provided a method for enhancing yield-related traits in plants, comprising introducing and expressing in a plant a nucleic acid sequence capable of hybridizing to SEQ ID NO: 57 or to SEQ ID NO: 59, or comprising introducing and expressing in a plant a nucleic acid sequence capable of hybridising to a nucleic acid sequence encoding an orthologue, paralogue or homologue of SEQ ID NO: 58 or of SEQ ID NO: 60.

[0263] Hybridising sequences useful in the methods of the invention encode a GRP polypeptide as defined herein, having substantially the same biological activity as the polypeptide sequences given in SEQ ID NO: 58. Preferably, the hybridising sequence is capable of hybridising to SEQ ID NO: 57 or to SEQ ID NO: 59, or to a portion of any of these sequences, a portion being as defined above, or the hybridising sequence is capable of hybridising to a nucleic acid sequence encoding an orthologue or paralogue of SEQ ID NO: 58 or of SEQ ID NO: 60.

[0264] Another nucleic acid sequence variant useful in the methods of the invention is a splice variant encoding a GRP polypeptide as defined hereinabove, a splice variant being as defined herein.

[0265] According to the present invention, there is provided a method for enhancing yield-related traits in plants, comprising introducing and expressing in a plant a splice variant of SEQ ID NO: 57 or of SEQ ID NO: 59, or a splice variant of a nucleic acid sequence encoding an orthologue, paralogue or homologue of SEQ ID NO: 58 or of SEQ ID NO: 60.

[0266] Another nucleic acid sequence variant useful in performing the methods of the invention is an allelic variant of a nucleic acid sequence encoding a GRP polypeptide as defined hereinabove, an allelic variant being as defined herein.

[0267] According to the present invention, there is provided a method for enhancing yield-related traits in plants, comprising introducing and expressing in a plant an allelic variant of SEQ ID NO: 57 or of SEQ ID NO: 59, or comprising introducing and expressing in a plant an allelic variant of a nucleic acid sequence encoding an orthologue, paralogue or homologue of the polypeptide sequences represented by SEQ ID NO: 58 or of SEQ ID NO: 60.

[0268] The allelic variants useful in the methods of the present invention have substantially the same biological activity as the GRP polypeptide of SEQ ID NO: 58 or of SEQ ID NO: 60. Allelic variants exist in nature, and encompassed within the methods of the present invention is the use of these natural alleles. Gene shuffling or directed evolution may also be used to generate variants of nucleic acids encoding GRP polypeptides as defined above; the term “gene shuffling” being as defined herein.

[0269] According to the present invention, there is provided a method for enhancing yield-related traits in plants, comprising introducing and expressing in a plant a variant of SEQ ID NO: 57 or of SEQ ID NO: 59, or comprising introducing and expressing in a plant a variant of a nucleic acid sequence encoding an orthologue, paralogue or homologue of SEQ ID NO: 58 or of SEQ ID NO: 60, which variant nucleic acid sequence is obtained by gene shuffling.

[0270] Furthermore, nucleic acid sequence variants may also be obtained by site-directed mutagenesis. Several methods are available to achieve site-directed mutagenesis, the most common being PCR based methods (Current Protocols in Molecular Biology. Wiley Eds.).

[0271] Nucleic acids encoding GRP polypeptides may be derived from any natural or artificial source. The nucleic acid sequence may be modified from its native form in composition and/or genomic environment through deliberate human manipulation. Preferably the GRP polypeptide-encoding nucleic acid sequence is from a plant. In the case of SEQ ID NO: 57 or of SEQ ID NO: 59, the GRP polypeptide encoding nucleic acid sequence is preferably from a dicotyledonous plant, more preferably from the family Solanaceae, most preferably the nucleic acid sequence is from Nicotiana tabacum.

[0272] Performance of the methods of the invention gives plants having enhanced yield-related traits. In particular performance of the methods of the invention gives plants having increased early vigour and increased yield, especially increased biomass and increased seed yield relative to control plants. The terms “yield” and “seed yield” are described in more detail in the “definitions” section herein.

[0273] Reference herein to enhanced yield-related traits is taken to mean an increase in early vigour and/or in biomass (weight) of one or more parts of a plant, which may include aboveground (harvestable) parts and/or (harvestable) parts below ground. In particular, such harvestable parts are biomass and/or seeds, and performance of the methods of the invention results in plants having increased early vigour, biomass and/or seed yield relative to the early vigour, biomass or seed yield of control plants.

[0274] Taking corn as an example, a yield increase may be manifested as one or more of the following: increase in the number of plants established per hectare or acre, an increase in the number of ears per plant, an increase in the number of rows, number of kernels per row, kernel weight, thousand kernel weight, ear length/diameter, increase in the seed filling rate (which is the number of filled seeds divided by the total number of seeds and multiplied by 100), among others. Taking rice as an example, a yield increase may manifest itself as an increase in one or more of the following: number of plants per hectare or acre, number of panicles per plant, number of spikelets per panicle, number of flowers (florets) per panicle (which is expressed as a ratio of the number of filled seeds over the number of primary panicles), increase in the seed filling rate (which is the number of filled seeds divided by the total number of seeds and multiplied by 100), increase in thousand kernel weight, among others.

[0275] The present invention provides a method for enhancing yield-related traits, especially biomass and/or seed yield of plants, relative to control plants, which method comprises modulating expression, preferably increasing expression, in a plant of a nucleic acid sequence encoding a GRP polypeptide as defined herein.

[0276] Since the transgenic plants according to the present invention have enhanced yield-related traits, it is likely that these plants exhibit an increased growth rate (during at least part of their life cycle), relative to the growth rate of control plants at a corresponding stage in their life cycle.

[0277] The increased growth rate may be specific to one or more parts of a plant (including seeds), or may be throughout substantially the whole plant. Plants having an increased growth rate may have a shorter life cycle. The life cycle of a plant may be taken to mean the time needed to grow from a dry mature seed up to the stage where the plant has produced dry mature seeds, similar to the starting material. This life cycle may be influenced by factors such as early vigour, growth rate, greenness index, flowering time and speed of seed maturation. The increase in growth rate may take place at one or more stages in the life cycle of a plant or during substantially the whole plant life cycle. Increased growth rate during the early stages in the life cycle of a plant may reflect enhanced vigour. The increase in growth rate may alter the harvest cycle of a plant allowing plants to be sown later and/or harvested sooner than would otherwise be possible (a similar effect may be obtained with earlier flowering time). If the growth rate is sufficiently increased, it may allow for the further sowing of seeds of the same plant species (for example sowing and harvesting of rice plants followed by sowing and harvesting of further rice plants all within one conventional growing period). Similarly, if the growth rate is sufficiently increased, it may allow for the further sowing of seeds of different plants species (for example the sowing and harvesting of corn plants followed by, for example, the sowing and optional harvesting of soybean, potato or any other suitable plant). Harvesting additional times from the same rootstock in the case of some crop plants may also be possible. Altering the harvest cycle of a plant may lead to an increase in annual biomass production per acre (due to an increase in the number of times (say in a year) that any particular plant may be grown and harvested). An increase in growth rate may also allow for the cultivation of transgenic plants in a wider geographical area than their wild-type counterparts, since the territorial limitations for growing a crop are often determined by adverse environmental conditions either at the time of planting (early season) or at the time of harvesting (late season). Such adverse conditions may be avoided if the harvest cycle is shortened. The growth rate may be determined by deriving various parameters from growth curves, such parameters may be: T-Mid (the time taken for plants to reach 50% of their maximal size) and T-90 (time taken for plants to reach 90% of their maximal size), amongst others.

[0278] According to a preferred feature of the present invention, performance of the methods of the invention gives plants having an increased growth rate relative to control plants. Therefore, according to the present invention, there is provided a method for increasing the growth rate of plants, which method comprises modulating expression, preferably increasing expression, in a plant of a nucleic acid sequence encoding a GRP polypeptide as defined herein.

[0279] An enhancement of yield-related traits (an increase in yield and/or growth rate) occurs whether the plant is under non-stress conditions or whether the plant is exposed to various stresses compared to control plants. Plants typically respond to exposure to stress by growing more slowly. In conditions of severe stress, the plant may even stop growing altogether. Mild stress on the other hand is defined herein as being any stress to which a plant is exposed which does not result in the plant ceasing to grow altogether without the capacity to resume growth. Mild stress in the sense of the invention leads to a reduction in the growth of the stressed plants of less than 40%, 35% or 30%, preferably less than 25%, 20% or 15%, more preferably less than 14%, 13%, 12%, 11% or 10% or less in comparison to the control plant under non-stress conditions. Due to advances in agricultural practices (irrigation, fertilization, pesticide treatments) severe stresses are not often encountered in cultivated crop plants. As a consequence, the compromised growth induced by mild stress is often an undesirable feature for agriculture. Mild stresses are the everyday biotic and/or abiotic (environmental) stresses to which a plant is exposed. Abiotic stresses may be due to drought or excess water, anaerobic stress, salt stress, chemical toxicity, oxidative stress and hot, cold or freezing temperatures. The abiotic stress may be an osmotic stress caused by a water stress (particularly due to drought), salt stress, oxidative stress or an ionic stress. Biotic stresses are typically those stresses caused by pathogens, such as bacteria, viruses, fungi and insects. The term “non-stress” conditions as used herein are those environmental conditions that allow optimal growth of plants. Persons skilled in the art are aware of normal soil conditions and climatic conditions for a given location.

[0280] Performance of the methods of the invention gives plants grown under non-stress conditions or under mild drought conditions enhanced yield-related traits relative to control plants grown under comparable conditions. Therefore, according to the present invention, there is provided a method for enhancing yield-related traits in plants grown under non-stress conditions or under mild drought conditions, which method comprises modulating, preferably increasing, expression in a plant of a nucleic acid sequence encoding a GRP polypeptide.

[0281] Performance of the methods according to the present invention results in plants grown under abiotic stress conditions having enhanced yield-related traits, preferably enhanced seed yield-related traits, relative to control plants grown under comparable stress conditions. As reported in Wang et al. (Planta (2003) 218: 1-14), abiotic stress leads to a series of morphological, physiological, biochemical and molecular changes that adversely affect plant growth and productivity. Drought, salinity, extreme temperatures and oxidative stress are known to be interconnected and may induce growth and cellular damage through similar mechanisms. Rabbani et al. (Plant Physiol (2003) 133: 1755-1767) describes a particularly high degree of “cross talk” between drought stress and high-salinity stress. For example, drought and/or salinisation are manifested primarily as osmotic stress, resulting in the disruption of homeostasis and ion distribution in the cell. Oxidative stress, which frequently accompanies high or low temperature, salinity or drought stress, may cause denaturing of functional and structural proteins. As a consequence, these diverse environmental stresses often activate similar cell signalling pathways and cellular responses, such as the production of stress proteins, up-regulation of anti-oxidants, accumulation of compatible solutes and growth arrest. Since diverse environmental stresses activate similar pathways, the exemplification of the present invention with drought stress should not be seen as a limitation to drought stress, but more as a screen to indicate the involvement of GRP polypeptides as defined above, in enhancing yield-related traits, preferably enhancing seed yield-related traits, relative to control plants grown in comparable stress conditions, in abiotic stresses in general.

[0282] The term “abiotic stress” as defined herein is taken to mean any one or more of: water stress (due to drought or excess water), anaerobic stress, salt stress, temperature stress (due to hot, cold or freezing temperatures), chemical toxicity stress and oxidative stress. According to one aspect of the invention, the abiotic stress is an osmotic stress, selected from water stress, salt stress, oxidative stress and ionic stress. Preferably, the water stress is drought stress. The term salt stress is not restricted to common salt (NaCl), but may be any stress caused by one or more of: NaCl, KCl, LiCl, MgCl2, CaCl2, amongst others.

[0283] Performance of the methods of the invention gives plants having enhanced yield-related traits, preferably enhanced seed yield-related traits, under abiotic stress conditions relative to control plants grown in comparable stress conditions. Therefore, according to the present invention, there is provided a method for enhancing yield-related traits, preferably enhancing seed yield-related traits, in plants grown under abiotic stress conditions, which method comprises modulatingexpression in a plant of a nucleic acid sequence encoding a GRP polypeptide. According to one aspect of the invention, the abiotic stress is an osmotic stress, selected from one or more of the following: water stress, salt stress, oxidative stress and ionic stress.

[0284] Performance of the methods of the invention gives plants grown under conditions of nutrient deficiency, particularly under conditions of nitrogen deficiency, enhanced yield-related traits relative to control plants grown under comparable conditions. Therefore, according to the present invention, there is provided a method for enhancing yield-related traits in plants grown under conditions of nutrient deficiency, which method comprises modulating, preferably increasing, expression in a plant of a nucleic acid sequence encoding a GRP polypeptide. Nutrient deficiency may result from a lack of nutrients such as nitrogen, phosphates and other phosphorous-containing compounds, potassium, calcium, cadmium, magnesium, manganese, iron and boron, amongst others.

[0285] The present invention encompasses plants, parts thereof (including seeds), or plant cells obtainable by the methods according to the present invention. The plants, parts thereof, or plant cells comprise a nucleic acid transgene encoding a GRP polypeptide as defined above.

[0286] The invention also provides genetic constructs and vectors to facilitate introduction and/or expression in plants of nucleic acids encoding GRP polypeptides. The gene constructs may be inserted into vectors, which may be commercially available, suitable for transforming into plants and suitable for expression of the gene of interest in the transformed cells. The invention also provides use of a gene construct as defined herein in the methods of the invention.

[0287] More specifically, the present invention provides a construct comprising:
[0288] (a) a nucleic acid sequence encoding a GRP polypeptide as defined above;
[0289] (b) one or more control sequences capable of driving expression of the nucleic acid sequence of (a); and optionally
[0290] (c) a transcription termination sequence.
[0291] Preferably, the nucleic acid sequence encoding a GRP polypeptide is as defined above. The term “control sequence” and “termination sequence” are as defined herein.

[0292] Plants are transformed with a vector comprising any of the nucleic acids described above. The skilled artisan is well aware of the genetic elements that must be present on the vector in order to successfully transform, select and propagate host cells containing the sequence of interest. The sequence of interest is operably linked to one or more control sequences (at least to a promoter).

[0293] Advantageously, any type of promoter, whether natural or synthetic, may be used to drive expression of the nucleic acid sequence. A seed-specific promoter is particularly useful in the methods of the invention. See the “Definitions” section herein for definitions of the various promoter types.

[0294] It should be clear that the applicability of the present invention is not restricted to the GRP polypeptide-encoding nucleic acid sequence represented by SEQ ID NO: 57 or of SEQ ID NO: 59, nor is the applicability of the invention restricted to expression of a GRP polypeptide-encoding nucleic acid sequence when driven by a seed-specific promoter.

[0295] The seed-specific promoter is preferably an oleosin promoter, preferably a oleosin promoter from rice. Further preferably the oleosin promoter is represented by a nucleic acid sequence substantially similar to SEQ ID NO: 91, most preferably the oleosin promoter is as represented by SEQ ID NO: 91. See Table 2b in the “Definitions” section herein for further examples of seed-specific promoters.

[0296] Optionally, one or more terminator sequences may be used in the construct introduced into a plant. Additional regulatory elements may include transcriptional as well as translational enhancers. Those skilled in the art will be aware of terminator and enhancer sequences that may be suitable for use in performing the invention. An intron sequence may also be added to the 5′ untranslated region (UTR) or in the coding sequence to increase the amount of the mature message that accumulates in the cytosol, as described in the definitions section. Other control sequences (besides promoter, enhancer, silencer, intron sequences, 3′UTR and/or 5′UTR regions) may be protein and/or RNA stabilizing elements. Such sequences would be known or may readily be obtained by a person skilled in the art.

[0297] The genetic constructs of the invention may further include an origin of replication sequence that is required for maintenance and/or replication in a specific cell type. One example is when a genetic construct is required to be maintained in a bacterial cell as an episomal genetic element (e.g. plasmid or cosmid molecule). Preferred origins of replication include, but are not limited to, the f1-ori and colE1.

[0298] For the detection of the successful transfer of the nucleic acid sequences as used in the methods of the invention and/or selection of transgenic plants comprising these nucleic acids, it is advantageous to use marker genes (or reporter genes). Therefore, the genetic construct may optionally comprise a selectable marker gene. Selectable markers are described in more detail in the “definitions” section herein. The marker genes may be removed or excised from the transgenic cell once they are no longer needed. Techniques for marker removal are known in the art, useful techniques are described above in the definitions section.

[0299] The invention also provides a method for the production of transgenic plants having enhanced yield-related traits relative to control plants, comprising introduction and expression in a plant of any nucleic acid sequence encoding a GRP polypeptide as defined hereinabove.

[0300] More specifically, the present invention provides a method for the production of transgenic plants having enhanced yield-related traits which method comprises:
[0301] (i) introducing and expressing in a plant, plant part, or plant cell, a nucleic acid sequence encoding a GRP polypeptide; and
[0302] (ii) cultivating the plant, plant part or plant cell under conditions promoting plant growth and development.

[0303] The nucleic acid sequence of (i) may be any of the nucleic acids capable of encoding a GRP polypeptide as defined herein.

[0304] The nucleic acid sequence may be introduced directly into a plant cell or into the plant itself (including introduction into a tissue, organ or any other part of a plant). According to a preferred feature of the present invention, the nucleic acid sequence is preferably introduced into a plant by transformation. The term “transformation” is described in more detail in the “definitions” section herein.

[0305] The genetically modified plant cells can be regenerated via all methods with which the skilled worker is familiar. Suitable methods can be found in the abovementioned publications by S. D. Kung and R. Wu, Potrykus or Hofgen and Willmitzer.

[0306] Generally after transformation, plant cells or cell groupings are selected for the presence of one or more markers which are encoded by plant-expressible genes co-transferred with the gene of interest, following which the transformed material is regenerated into a whole plant. To select transformed plants, the plant material obtained in the transformation is, as a rule, subjected to selective conditions so that transformed plants can be distinguished from untransformed plants. For example, the seeds obtained in the above-described manner can be planted and, after an initial growing period, subjected to a suitable selection by spraying. A further possibility consists in growing the seeds, if appropriate after sterilization, on agar plates using a suitable selection agent so that only the transformed seeds can grow into plants. Alternatively, the transformed plants are screened for the presence of a selectable marker such as the ones described above.

[0307] Following DNA transfer and regeneration, putatively transformed plants may also be evaluated, for instance using Southern analysis, for the presence of the gene of interest, copy number and/or genomic organisation. Alternatively or additionally, expression levels of the newly introduced DNA may be monitored using Northern and/or Western analysis, both techniques being well known to persons having ordinary skill in the art.

[0308] The generated transformed plants may be propagated by a variety of means, such as by clonal propagation or classical breeding techniques. For example, a first generation (or T1) transformed plant may be selfed and homozygous second-generation (or T2) transformants selected, and the T2 plants may then further be propagated through classical breeding techniques. The generated transformed organisms may take a variety of forms. For example, they may be chimeras of transformed cells and non-transformed cells; clonal transformants (e.g., all cells transformed to contain the expression cassette); grafts of transformed and untransformed tissues (e.g., in plants, a transformed rootstock grafted to an untransformed scion).

[0309] The present invention clearly extends to any plant cell or plant produced by any of the methods described herein, and to all plant parts and propagules thereof. The present invention extends further to encompass the progeny of a primary transformed or transfected cell, tissue, organ or whole plant that has been produced by any of the aforementioned methods, the only requirement being that progeny exhibit the same genotypic and/or phenotypic characteristic(s) as those produced by the parent in the methods according to the invention.

[0310] The invention also includes host cells containing an isolated nucleic acid sequence encoding a GRP polypeptide as defined hereinabove. Preferred host cells according to the invention are plant cells. Host plants for the nucleic acids or the vector used in the method according to the invention, the expression cassette or construct or vector are, in principle, advantageously all plants, which are capable of synthesizing the polypeptides used in the inventive method.

[0311] The methods of the invention are advantageously applicable to any plant. Plants that are particularly useful in the methods of the invention include all plants which belong to the superfamily Viridiplantae, in particular monocotyledonous and dicotyledonous plants including fodder or forage legumes, ornamental plants, food crops, trees or shrubs. According to a preferred embodiment of the present invention, the plant is a crop plant. Examples of crop plants include soybean, sunflower, canola, alfalfa, rapeseed, cotton, tomato, potato and tobacco. Further preferably, the plant is a monocotyledonous plant. Examples of monocotyledonous plants include sugarcane. More preferably the plant is a cereal. Examples of cereals include rice, maize, wheat, barley, millet, rye, triticale, sorghum and oats.

[0312] The invention also extends to harvestable parts of a plant such as, but not limited to seeds, leaves, fruits, flowers, stems, roots, rhizomes, tubers and bulbs. The invention furthermore relates to products derived, preferably directly derived, from a harvestable part of such a plant, such as dry pellets or powders, oil, fat and fatty acids, starch or proteins.

[0313] According to a preferred feature of the invention, the modulated expression is increased expression. Methods for increasing expression of nucleic acids or genes, or gene products, are well documented in the art and examples are provided in the definitions section.

[0314] As mentioned above, a preferred method for modulating (preferably, increasing) expression of a nucleic acid sequence encoding a GRP polypeptide is by introducing and expressing in a plant a nucleic acid sequence encoding a GRP polypeptide; however the effects of performing the method, i.e. enhancing yield-related traits may also be achieved using other well known techniques, including but not limited to T-DNA activation tagging, TILLING, homologous recombination. A description of these techniques is provided in the definitions section.

[0315] The present invention also encompasses use of nucleic acids encoding GRP polypeptides as described herein and use of these GRP polypeptides in enhancing any of the aforementioned yield-related traits in plants.

[0316] Nucleic acids encoding GRP polypeptide described herein, or the GRP polypeptides themselves, may find use in breeding programmes in which a DNA marker is identified which may be genetically linked to a GRP polypeptide-encoding gene. The nucleic acids/genes, or the GRP polypeptides themselves may be used to define a molecular marker. This DNA or protein marker may then be used in breeding programmes to select plants having enhanced yield-related traits as defined hereinabove in the methods of the invention.

[0317] Allelic variants of a GRP polypeptide-encoding nucleic acid/gene may also find use in marker-assisted breeding programmes. Such breeding programmes sometimes require introduction of allelic variation by mutagenic treatment of the plants, using for example EMS mutagenesis; alternatively, the programme may start with a collection of allelic variants of so called “natural” origin caused unintentionally. Identification of allelic variants then takes place, for example, by PCR. This is followed by a step for selection of superior allelic variants of the sequence in question and which give enhanced yield-related traits. Selection is typically carried out by monitoring growth performance of plants containing different allelic variants of the sequence in question. Growth performance may be monitored in a greenhouse or in the field. Further optional steps include crossing plants in which the superior allelic variant was identified with another plant. This could be used, for example, to make a combination of interesting phenotypic features.

[0318] Nucleic acids encoding GRP polypeptides may also be used as probes for genetically and physically mapping the genes that they are a part of, and as markers for traits linked to those genes. Such information may be useful in plant breeding in order to develop lines with desired phenotypes. Such use of GRP polypeptide-encoding nucleic acids requires only a nucleic acid sequence of at least 15 nucleotides in length. The GRP polypeptide-encoding nucleic acids may be used as restriction fragment length polymorphism (RFLP) markers. Southern blots (Sambrook J, Fritsch E F and Maniatis T (1989) Molecular Cloning, A Laboratory Manual) of restriction-digested plant genomic DNA may be probed with the GRP-encoding nucleic acids. The resulting banding patterns may then be subjected to genetic analyses using computer programs such as MapMaker (Lander et al. (1987) Genomics 1: 174-181) in order to construct a genetic map. In addition, the nucleic acids may be used to probe Southern blots containing restriction endonuclease-treated genomic DNAs of a set of individuals representing parent and progeny of a defined genetic cross. Segregation of the DNA polymorphisms is noted and used to calculate the position of the GRP polypeptide-encoding nucleic acid sequence in the genetic map previously obtained using this population (Botstein et al. (1980) Am. J. Hum. Genet. 32:314-331).

[0319] The production and use of plant gene-derived probes for use in genetic mapping is described in Bernatzky and Tanksley (1986) Plant Mol. Biol. Reporter 4: 37-41. Numerous publications describe genetic mapping of specific cDNA clones using the methodology outlined above or variations thereof. For example, F2 intercross populations, backcross populations, randomly mated populations, near isogenic lines, and other sets of individuals may be used for mapping. Such methodologies are well known to those skilled in the art.

[0320] The nucleic acid sequence probes may also be used for physical mapping (i.e., placement of sequences on physical maps; see Hoheisel et al. In: Non-mammalian Genomic Analysis: A Practical Guide, Academic press 1996, pp. 319-346, and references cited therein).

[0321] In another embodiment, the nucleic acid sequence probes may be used in direct fluorescence in situ hybridisation (FISH) mapping (Trask (1991) Trends Genet. 7:149-154). Although current methods of FISH mapping favour use of large clones (several kb to several hundred kb; see Laan et al. (1995) Genome Res. 5:13-20), improvements in sensitivity may allow performance of FISH mapping using shorter probes.

[0322] A variety of nucleic acid sequence amplification-based methods for genetic and physical mapping may be carried out using the nucleic acids. Examples include allele-specific amplification (Kazazian (1989) J. Lab. Clin. Med 11:95-96), polymorphism of PCR-amplified fragments (CAPS; Sheffield et al. (1993) Genomics 16:325-332), allele-specific ligation (Landegren et al. (1988) Science 241:1077-1080), nucleotide extension reactions (Sokolov (1990) nucleic acid sequence Res. 18:3671), Radiation Hybrid Mapping (Walter et al. (1997) Nat. Genet. 7:22-28) and Happy Mapping (Dear and Cook (1989) nucleic acid sequence Res. 17:6795-6807). For these methods, the sequence of a nucleic acid sequence is used to design and produce primer pairs for use in the amplification reaction or in primer extension reactions. The design of such primers is well known to those skilled in the art. In methods employing PCR-based genetic mapping, it may be necessary to identify DNA sequence differences between the parents of the mapping cross in the region corresponding to the instant nucleic acid sequence. This, however, is generally not necessary for mapping methods.

[0323] The methods according to the present invention result in plants having enhanced yield-related traits, as described hereinbefore. These traits may also be combined with other economically advantageous traits, such as further yield-enhancing traits, tolerance to other abiotic and biotic stresses, traits modifying various architectural features and/or biochemical and/or physiological features.

[0324] The term “table A2” used in this specification is to be taken to specify the content of table A2a and table A2b. The term “table A2a” used in this specification is to be taken to specify the content of table A2a. The term “table A2b” used in this specification is to be taken to specify the content of table A2b. In one preferred embodiment, the term “table A2” means table A2b.

[0325] In one embodiment the invention relates to subject mater summarized as follows:

Item 21: A method for enhancing yield-related traits in plants relative to control plants, comprising modulating expression in a plant of a nucleic acid sequence encoding a GRP, wherein said GRP is an RrmJ/FtsJ ribosomal RNA methyltransferase polypeptide (RrmJ/FtsJ polypeptide), and optionally selecting for plants having enhance yield-related traits.
Item 22: Method according to item 21, wherein said GRP polypeptide comprises a ribosomal RNA methyltransferase RrmJ/FtsJ domain (InterPro entries IPR002877 and IPR015507; Pfam entry PF01728; PANTHER entry PTHR10920).
Item 23: Method according to item 21 or 22, wherein said GRP polypeptide has in increasing order of preference at least 50%, 55%, 60%, 65%, 70%, 75%, 80%, 85%, 90%, 95%, 98%, 99% or more polypeptide sequence identity to the GRP polypeptide as represented by SEQ ID NO: 58, or by SEQ ID NO: 60, or to any of the polypeptide sequences given in Table A2 of Example 1.
Item 24: Method according to any of the items 21 to 23, wherein said nucleic acid sequence encoding a GRP polypeptide is represented by any one of the nucleic acid sequence SEQ ID NOs given in Table A2 or a portion thereof, or a sequence capable of hybridising with any one of the nucleic acid sequences SEQ ID NOs given in Table A2 of Example 1.
Item 25: Method according to any preceding item wherein said modulated expression is effected by introducing and expressing in a plant a nucleic acid sequence encoding said GRP polypeptide.
Item 26: Method according to any preceding item, wherein said enhanced yield-related traits comprise increased seed yield, increased number of filled seeds, increased seed fill rate, and increased harvest index, relative to control plants.
Item 27: Method according to any preceding item, wherein said modulated expression is increased expression.
Item 28: Method according to any preceding item, wherein said nucleic acid sequence is operably linked to a seed-specific promoter, preferably to an oleosin promoter, most preferably to an oleosin promoter from rice.
Item 29: Method according to any preceding item, wherein said nucleic acid sequence encoding a GRP polypeptide is of plant origin, preferably from a dicotyledonous plant, further preferably from the family Solanaceae, more preferably from Nicotiana tabacum.
Item 30: An isolated nucleic acid sequence comprising a nucleic acid sequence selected from the group consisting of:
[0326] a) an isolated nucleic acid molecule encoding the polypeptide as depicted in SEQ ID NO: 97, 99, 101 and/or 103 and/or table A2b;
[0327] b) an isolated nucleic acid molecule as depicted in SEQ ID NO: 96, 98, 100 and/or 102 and/or table A2b;
[0328] c) an isolated nucleic acid molecule, which, as a result of the degeneracy of the genetic code, can be derived from a polypeptide sequence depicted in table A2 and confers enhanced yield-related traits relative to control plants;
[0329] d) an isolated nucleic acid molecule having at least 30%, 31%, 32%, 33%, 34%, 35%, 36%, 37%, 38%, 39%, 40%, 41%, 42%, 43%, 44%, 45%, 46%, 47%, 48%, 49%, 50%, 51%, 52%, 53%, 54%, 55%, 56%, 57%, 58%, 59%, 60%, 61%, 62%, 63%, 64%, 65%, 66%, 67%, 68%, 69%, 70%, 71%, 72%, 73%, 74%, 75%, 76%, 77%, 78%, 79%, 80%, 81%, 82%, 83%, 84%, 85%, 86%, 87%, 88%, 89%, 90%, 91%, 92%, 93%, 94%, 95%, 96%, 97%, 98%, or 99% sequence identity with the nucleic acid molecule sequence of a polynucleotide comprising the nucleic acid molecule depicted in table A2 and confers enhanced yield-related traits relative to control plants;
[0330] e) an isolated nucleic acid molecule encoding a polypeptide having at least 30%, 31%, 32%, 33%, 34%, 35%, 36%, 37%, 38%, 39%, 40%, 41%, 42%, 43%, 44%, 45%, 46%, 47%, 48%, 49%, 50%, 51%, 52%, 53%, 54%, 55%, 56%, 57%, 58%, 59%, 60%, 61%, 62%, 63%, 64%, 65%, 66%, 67%, 68%, 69%, 70%, 71%, 72%, 73%, 74%, 75%, 76%, 77%, 78%, 79%, 80%, 81%, 82%, 83%, 84%, 85%, 86%, 87%, 88%, 89%, 90%, 91%, 92%, 93%, 94%, 95%, 96%, 97%, 98%, or 99% sequence identity with the amino acid sequence of the polypeptide encoded by the nucleic acid molecule of (a) to (c) and confers enhanced yield-related traits relative to control plants;
[0331] f) an isolated nucleic acid molecule which hybridizes with a nucleic acid molecule of (a) to (c) under stringent hybridization conditions and confers enhanced yield-related traits relative to control plants;
[0332] g) an isolated nucleic acid molecule encoding a polypeptide comprising the consensus sequence or one or more polypeptide motifs as shown FIG. 5 and preferably having the activity represented by a nucleic acid molecule comprising a polynucleotide as depicted in table A2;
[0333] h) an isolated nucleic acid molecule encoding a polypeptide having the activity represented by a protein as depicted in table A2 and confering enhanced yield-related traits relative to control plants;
[0334] and
[0335] i) a nucleic acid molecule which is obtainable by screening a suitable nucleic acid library under stringent hybridization conditions with a probe comprising a complementary sequence of a nucleic acid molecule of (a) or (b) or with a fragment thereof, having at least 15 nt, preferably 20 nt, 30 nt, 50 nt, 100 nt, 200 nt or 500 nt of a nucleic acid molecule complementary to a nucleic acid molecule sequence characterized in (a) to (e) and encoding a polypeptide having the activity represented by a protein comprising a polypeptide as depicted in table A2;
   whereby the nucleic acid molecule according to (a) to (i) is at least in one or more nucleotides different from the sequence depicted in table A2a and preferably which encodes a protein which differs at least in one or more amino acids from the protein sequences depicted in table A2a.
   Item 31: Plant, part thereof (including seeds), or plant cell obtainable by a method according to any preceding item, wherein said plant, part thereof, or plant cell comprises a nucleic acid transgene encoding a GRP polypeptide, preferably according to item 30.
   Tem 32: Construct comprising:
[0336] (i) nucleic acid sequence encoding a GRP polypeptide as defined in items 21 to 24 or of a polypeptide encoded by a nucleic acid molecule according to item 30;
[0337] (ii) one or more control sequences capable of driving expression of the nucleic acid sequence of (i); and optionally
[0338] (iii) a transcription termination sequence.
   Item 33: Construct according to item 32, wherein one of said control sequences is a seed-specific promoter, preferably an oleosin promoter, most preferably a oleosin promoter from rice.
   Item 34: Use of a construct according to any of items 32 or 33 or of a nucleic acid molecule according to item 30 in a method for making plants having enhanced yield-related traits, particularly increased seed yield, increased number of filled seeds, increased seed fill rate, and increased harvest index, relative to control plants.
   Item 35: Plant, plant part or plant cell transformed with a construct according to any of items 32 or 33.
   Item 36: Method for the production of a transgenic plant having enhanced-yield related traits relative to control plants, comprising:
[0339] 8I9 introducing and expressing in a plant, plant part, or plant cell, a nucleic acid sequence encoding a GRP polypeptide as defined in items 21 to 24 or of a polypeptide encoded by a nucleic acid molecule according to item 30; and
[0340] (ii) cultivating the plant, plant part, or plant cell under conditions promoting plant growth and development.
   Item 37: Transgenic plant having enhanced yield-related traits, particularly increased seed yield, increased number of filled seeds, increased seed fill rate, and increased harvest index, relative to control plants, resulting from increased expression of a nucleic acid sequence encoding a GRP polypeptide as defined in items 21 to 24 or of a polypeptide encoded by a nucleic acid molecule according to item 30, or a transgenic plant cell derived from said transgenic plant.
   Item 38: Transgenic plant according to item 31, 35 or 37, or a transgenic plant cell derived thereof, wherein said plant is a crop plant or a monocot or a cereal, such as rice, maize, wheat, barley, millet, rye, triticale, sorghum and oats.
   Item 39: Harvestable parts of a plant comprising a nucleic acid sequence encoding a GRP polypeptide according to item 38, wherein said harvestable parts are preferably seeds.
   Item 40: Products derived from a plant according to item 38 and/or from harvestable parts of a plant according to item 39.
   Item 41: Use of a nucleic acid sequence encoding a GRP polypeptide in enhanced yield-related traits in plants, particularly in increasing particularly increased seed yield, increased number of filled seeds, increased seed fill rate, and increased harvest index, relative to control plants.

[0341] According to a further embodiment of the present invention, there is also provided an isolated polypeptide comprising a polypeptide sequence selected from the group consisting of:

(i) an amino acid sequence encoded by any one of the nucleic acids represented by Item 30;
(ii) an amino acid sequence having, in increasing order of preference, at least 50%, 55%, 60%, 65%, 70%, 75%, 80%, 85%, 90%, 95%, 96%, 97%, 98%, 99% or more sequence identity to the amino acid sequence of (i);
(iii) derivatives of any of the amino acid sequences given in (i) or (ii) above.

[0342] In an other embodiment of the invention it has now been found that modulating expression (preferably, increasing) in a plant of a nucleic acid sequence encoding a GRP polypeptide, wherein said GRP polypeptide is a basic-helix-loop-helix 4 (bHLH4) polypeptide, gives plants having enhanced yield-related traits, preferably enhanced seed yield-related traits, relative to control plants. According to a first embodiment, the present invention provides a method for enhancing yield-related traits, preferably enhanced seed yield-related traits, in plants relative to control plants, comprising modulating expression (preferably, increasing) in a plant of a nucleic acid sequence encoding a GRP polypeptide, wherein said GRP polypeptide is a basic-helix-loop-helix 4 (bHLH4) polypeptide.

[0343] A preferred method for modulating (preferably, increasing) expression of a nucleic acid sequence encoding a GRP polypeptide is by introducing and expressing in a plant a nucleic acid sequence encoding a GRP polypeptide.

[0344] Any reference hereinafter to a “protein useful in the methods of the invention” is taken to mean a GRP polypeptide as defined herein. Any reference hereinafter to a “nucleic acid sequence useful in the methods of the invention” is taken to mean a nucleic acid sequence capable of encoding such a GRP polypeptide. The nucleic acid sequence to be introduced into a plant (and therefore useful in performing the methods of the invention) is any nucleic acid sequence encoding the type of protein which will now be described, hereafter also named “GRP nucleic acid sequence” or “GRP gene”.

[0345] In one embodiment of the invention a “GRP polypeptide” as defined herein refers the proteins represented by SEQ ID NO: 105, and to orthologues, paralogues, and homologues thereof. Table A3 of Example 1 herein presents such orthologues and paralogues.

[0346] Preferably, the orthologues, paralogues, and homologues of SEQ ID NO: 105 have a basic-helix-loop-helix dimerisation region with InterPro entry IPR001092, and helix-loop-helix DNA-binding with InterPro entry IPR011598.

[0347] Alternatively or additionally, a “GRP polypeptide” as defined herein refers to any polypeptide having in increasing order of preference at least 50%, 55%, 60%, 65%, 70%, 75%, 80%, 85%, 90%, 95%, 98%, 99% or more amino acid sequence identity to the GRP polypeptide as represented by SEQ ID NO: 105, or to any of the polypeptide sequences given in Table A3 of Example 1 herein.

[0348] The term “domain” and “motif” is defined in the “definitions” section herein. Specialist databases exist for the identification of domains, for example, SMART (Schultz et al. (1998) Proc. Natl. Acad. Sci. USA 95, 5857-5864; Letunic et al. (2002) Nucleic Acids Res 30, 242-244), InterPro (Mulder et al., (2003) Nucl. Acids. Res. 31, 315-318), Prosite (Bucher and Bairoch (1994), A generalized profile syntax for biomolecular sequences motifs and its function in automatic sequence interpretation. (In) ISMB-94; Proceedings 2nd International Conference on Intelligent Systems for Molecular Biology. Altman R., Brutlag D., Karp P., Lathrop R., Searls D., Eds., pp 53-61, AAAI Press, Menlo Park; Hulo et al., Nucl. Acids. Res. 32:D134-D137, (2004) ), or Pfam (Bateman et al., Nucleic Acids Research 30(1): 276-280 (2002) ). A set of tools for in silico analysis of protein sequences is available on the ExPASy proteomics server (Swiss Institute of Bioinformatics (Gasteiger et al., ExPASy: the proteomics server for in-depth protein knowledge and analysis, Nucleic Acids Res. 31:3784-3788 (2003) ). Domains or motifs may also be identified using routine techniques, such as by sequence alignment.

[0349] Methods for the alignment of sequences for comparison are well known in the art, such methods include GAP, BESTFIT, BLAST, FASTA and TFASTA. GAP uses the algorithm of Needleman and Wunsch ((1970) J Mol Biol 48: 443-453) to find the global (i.e. spanning the complete sequences) alignment of two sequences that maximizes the number of matches and minimizes the number of gaps. The BLAST algorithm (Altschul et al. (1990) J Mol Biol 215: 403-10) calculates percent sequence identity and performs a statistical analysis of the similarity between the two sequences. The software for performing BLAST analysis is publicly available through the National Centre for Biotechnology Information (NCBI). Homologues may readily be identified using, for example, the ClustalW multiple sequence alignment algorithm (version 1.83), with the default pairwise alignment parameters, and a scoring method in percentage. Global percentages of similarity and identity may also be determined using one of the methods available in the MatGAT software package (Campanella et al., BMC Bioinformatics. 2003 Jul. 10; 4:29. MatGAT: an application that generates similarity/identity matrices using protein or DNA sequences). Minor manual editing may be performed to optimise alignment between conserved motifs, as would be apparent to a person skilled in the art. Furthermore, instead of using full-length sequences for the identification of homologues, specific domains may also be used. The sequence identity values may be determined over the entire nucleic acid sequence or polypeptide sequence or over selected domains or conserved motif(s), using the programs mentioned above using the default parameters.

[0350] Furthermore, GRP polypeptides, as far as SEQ ID NO: 105, and its orthologues, paralogues, and homologues are concerned, typically have the capability to bind DNA (at least in their native form), but not necessarily, have transcriptional regulatory activity and capacity to interact with other proteins. Therefore, GRP polypeptides with reduced transcriptional regulatory activity, without transcriptional regulatory activity, with reduced protein-protein interaction capacity, or with no protein-protein interaction capacity, may equally be useful in the methods of the present invention. DNA-binding activity and protein-protein interactions may readily be determined in vitro or in vivo using techniques well known in the art (for example in Current Protocols in Molecular Biology, Volumes 1 and 2, Ausubel et al. (1994), Current Protocols). To determine the DNA binding activity of GRP polypeptides, several assays are available, such as DNA binding gel-shift assays (or gel retardation assays; Korfhage et al. (1994) Plant C 6: 695-708), in vitro DNA binding assays (Schindler et al. (1993) Plant J 4(1): 137-150), or transcriptional activation of GRP polypeptides in yeast, animal and plant cells. GRP polypeptides typically bind to a consensus sequence called an E-box, CANNTG. The canonical E-box is CACGTG (palindromic), however some bHLH4 transcription factors bind to different sequences, which are often similar to the E-box. Specific DNA binding sequences can be determined using the random oligonucleotide selection technique (Viola & Gonzalez (May 26, 2007) Biochemistry).

[0351] The present invention is illustrated by transforming plants with the nucleic acid sequence represented by SEQ ID NO: 104, encoding the polypeptide sequence of SEQ ID NO: 105. However, performance of the invention is not restricted to these sequences; the methods of the invention may advantageously be performed using any GRP-encoding nucleic acid sequence or GRP polypeptide as defined herein.

[0352] Examples of nucleic acid sequences encoding GRP polypeptides may be found in databases known in the art. Such nucleic acid sequences are useful in performing the methods of the invention. Orthologues and paralogues, the terms “orthologues” and “paralogues” being as defined herein, may readily be identified by performing a so-called reciprocal blast search. Typically, this involves a first BLAST involving BLASTing a query sequence (for example using SEQ ID NO: 105) against any sequence database, such as the publicly available NCBI database. BLASTN or TBLASTX (using standard default values) are generally used when starting from a nucleotide sequence, and BLASTP or TBLASTN (using standard default values) when starting from a protein sequence. The BLAST results may optionally be filtered. The full-length sequences of either the filtered results or non-filtered results are then BLASTed back (second BLAST) against sequences from the organism from which the query sequence is derived (where the query sequence is SEQ ID NO: 104 or SEQ ID NO: 105, the second BLAST would therefore be against Arabidopsis thaliana sequences). The results of the first and second BLASTs are then compared. A paralogue is identified if a high-ranking hit from the first blast is from the same species as from which the query sequence is derived, a BLAST back then ideally results in the query sequence amongst the highest hits; an orthologue is identified if a high-ranking hit in the first BLAST is not from the same species as from which the query sequence is derived, and preferably results upon BLAST back in the query sequence being among the highest hits.

[0353] High-ranking hits are those having a low E-value. The lower the E-value, the more significant the score (or in other words the lower the chance that the hit was found by chance). Computation of the E-value is well known in the art. In addition to E-values, comparisons are also scored by percentage identity. Percentage identity refers to the number of identical nucleotides (or amino acids) between the two compared nucleic acid sequence (or polypeptide) sequences over a particular length. In the case of large families, ClustalW may be used, followed by a neighbour joining tree, to help visualize clustering of related genes and to identify orthologues and paralogues.

[0354] Nucleic acid sequence variants encoding homologues and derivatives of SEQ ID NO: 105 may also be useful in practising the methods of the invention, the terms “homologue” and “derivative” being as defined herein. Also useful in the methods of the invention are nucleic acid sequences encoding homologues and derivatives of orthologues or paralogues of SEQ ID NO: 105. Homologues and derivatives useful in the methods of the present invention have substantially the same biological and functional activity as the unmodified protein from which they are derived.

[0355] Further nucleic acid sequence variants useful in practising the methods of the invention include portions of nucleic acid sequences encoding GRP polypeptides, nucleic acid sequences hybridising to nucleic acid sequences encoding GRP polypeptides, splice variants of nucleic acid sequences encoding GRP polypeptides, allelic variants of nucleic acid sequences encoding GRP polypeptides and variants of nucleic acid sequences encoding GRP polypeptides obtained by gene shuffling. The terms hybridising sequence, splice variant, allelic variant and gene shuffling are as described herein.

[0356] Nucleic acid sequences encoding GRP polypeptides need not be full-length nucleic acid sequences, since performance of the methods of the invention does not rely on the use of full-length nucleic acid sequences. According to the present invention, there is provided a method for enhancing yield-related traits in plants, preferably enhanced seed yield-related traits, comprising introducing and expressing in a plant a portion of SEQ ID NO: 104, or a portion of a nucleic acid sequence encoding an orthologue, paralogue or homologue of SEQ ID NO: 105.

[0357] A portion of a nucleic acid sequence may be prepared, for example, by making one or more deletions to the nucleic acid sequence. The portions may be used in isolated form or they may be fused to other coding (or non-coding) sequences in order to, for example, produce a protein that combines several activities. When fused to other coding sequences, the resultant polypeptide produced upon translation may be bigger than that predicted for the protein portion.

[0358] Portions useful in the methods of the invention, encode a GRP polypeptide as defined herein, and have substantially the same biological activity as the polypeptide sequence given in SEQ ID NO: 105. Preferably, the portion is a portion of the nucleic acid sequence given in SEQ ID NO: 104, or is a portion of a nucleic acid sequence encoding an orthologue or paralogue of the polypeptide sequence given in SEQ ID NO: 105. Preferably the portion is at least 500, 600, 700, 800, 850, 900, 950, 1000, 1050, 1100, 1150, 1200, 1250, 1300, 1350, 1400, 1450, 1500, 1550, 1600, 1650, 1700, 1750 or more consecutive nucleotides in length, the consecutive nucleotides being of SEQ ID NO: 104, or of a nucleic acid sequence encoding an orthologue or paralogue of SEQ ID NO: 105. Most preferably the portion is a portion of the nucleic acid sequence of SEQ ID NO: 104.

[0359] Another nucleic acid sequence variant useful in the methods of the invention is a nucleic acid sequence capable of hybridising, under reduced stringency conditions, preferably under stringent conditions, with a nucleic acid sequence encoding a GRP polypeptide as defined herein, or with a portion as defined herein.

[0360] According to the present invention, there is provided a method for enhancing yield-related traits in plants, preferably enhanced seed yield-related traits, comprising introducing and expressing in a plant a nucleic acid sequence capable of hybridizing to SEQ ID NO: 104, or comprising introducing and expressing in a plant a nucleic acid sequence capable of hybridising to a nucleic acid sequence encoding an orthologue, paralogue or homologue of SEQ ID NO: 105.

[0361] Hybridising sequences useful in the methods of the invention encode a GRP polypeptide as defined herein, having substantially the same biological activity as the polypeptide sequence given in SEQ ID NO: 105. Preferably, the hybridising sequence is capable of hybridising to SEQ ID NO: 104, or to a portion of this sequence, a portion being as defined above, or the hybridising sequence is capable of hybridising to a nucleic acid sequence encoding an orthologue or paralogue of SEQ ID NO: 105, or to a portion thereof.

[0362] Another nucleic acid sequence variant useful in the methods of the invention is a splice variant encoding a GRP polypeptide as defined hereinabove, a splice variant being as defined herein.

[0363] According to the present invention, there is provided a method for enhancing yield-related traits in plants, preferably enhancing seed yield-related traits, comprising introducing and expressing in a plant a splice variant of SEQ ID NO: 104, or a splice variant of a nucleic acid sequence encoding an orthologue, paralogue or homologue of SEQ ID NO: 105.

[0364] Another nucleic acid sequence variant useful in performing the methods of the invention is an allelic variant of a nucleic acid sequence encoding a GRP polypeptide as defined hereinabove, an allelic variant being as defined herein.

[0365] According to the present invention, there is provided a method for enhancing yield-related traits in plants, preferably enhanced seed yield-related traits, comprising introducing and expressing in a plant an allelic variant of SEQ ID NO: 104, or comprising introducing and expressing in a plant an allelic variant of a nucleic acid sequence encoding an orthologue, paralogue or homologue of the polypeptide sequence represented by SEQ ID NO: 105.

[0366] The allelic variants useful in the methods of the present invention have substantially the same biological activity as the GRP polypeptide of SEQ ID NO: 105. Allelic variants exist in nature, and encompassed within the methods of the present invention is the use of these natural alleles. Gene shuffling or directed evolution may also be used to generate variants of nucleic acid sequences encoding GRP polypeptides as defined above; the term “gene shuffling” being as defined herein.

[0367] According to the present invention, there is provided a method for enhancing yield-related traits in plants, preferably enhanced seed yield-related traits, comprising introducing and expressing in a plant a variant nucleic acid sequence of SEQ ID NO: 104, or comprising introducing and expressing in a plant a variant of a nucleic acid sequence encoding an orthologue, paralogue or homologue of SEQ ID NO: 105, which variant nucleic acid sequence is obtained by gene shuffling.

[0368] Furthermore, nucleic acid sequence variants may also be obtained by site-directed mutagenesis. Several methods are available to achieve site-directed mutagenesis, the most common being PCR based methods (Current Protocols in Molecular Biology. Wiley Eds.).

[0369] Nucleic acid sequences encoding GRP polypeptides may be derived from any natural or artificial source. The nucleic acid sequence may be modified from its native form in composition and/or genomic environment through deliberate human manipulation. Preferably the GRP polypeptide-encoding nucleic acid sequence is from a plant. In the case of SEQ ID NO: 104, the GRP polypeptide encoding nucleic acid sequence is preferably from a dicotyledonous plant, more preferably from the family Brassicaceae, most preferably the nucleic acid sequence is from Arabidopsis thaliana.

[0370] Performance of the methods of the invention gives plants having enhanced yield-related traits, in particular enhanced seed yield-related traits. The terms “yield” and “seed yield” are described in more detail in the “definitions” section herein.

[0371] Reference herein to enhanced yield-related traits is taken to mean an increase in early vigour and/or in biomass (weight) of one or more parts of a plant, which may include aboveground (harvestable) parts and/or (harvestable) parts below ground. In particular, such harvestable parts are biomass and/or seeds, and performance of the methods of the invention results in plants having increased early vigour, biomass and/or seed yield relative to the early vigour, biomass or seed yield of control plants.

[0372] Taking corn as an example, a yield increase may be manifested as one or more of the following: increase in the number of plants established per hectare or acre, an increase in the number of ears per plant, an increase in the number of rows, number of kernels per row, kernel weight, thousand kernel weight, ear length/diameter, increase in the seed filling rate (which is the number of filled seeds divided by the total number of seeds and multiplied by 100), among others. Taking rice as an example, a yield increase may manifest itself as an increase in one or more of the following: number of plants per hectare or acre, number of panicles per plant, number of spikelets per panicle, number of flowers (florets) per panicle (which is expressed as a ratio of the number of filled seeds over the number of primary panicles), increase in the seed filling rate (which is the number of filled seeds divided by the total number of seeds and multiplied by 100), increase in thousand kernel weight, among others.

[0373] The present invention provides a method for enhancing yield-related traits, especially biomass and/or seed yield of plants, relative to control plants, which method comprises modulating expression (preferably, increasing) in a plant of a nucleic acid sequence encoding a GRP polypeptide as defined herein.

[0374] Since the transgenic plants according to the present invention have enhanced yield-related traits, preferably enhanced seed yield-related traits, it is likely that these plants exhibit an increased growth rate (during at least part of their life cycle), relative to the growth rate of control plants at a corresponding stage in their life cycle.

[0375] The increased growth rate may be specific to one or more parts of a plant (including seeds), or may be throughout substantially the whole plant. Plants having an increased growth rate may have a shorter life cycle. The life cycle of a plant may be taken to mean the time needed to grow from a dry mature seed up to the stage where the plant has produced dry mature seeds, similar to the starting material. This life cycle may be influenced by factors such as early vigour, growth rate, greenness index, flowering time and speed of seed maturation. The increase in growth rate may take place at one or more stages in the life cycle of a plant or during substantially the whole plant life cycle. Increased growth rate during the early stages in the life cycle of a plant may reflect enhanced vigour. The increase in growth rate may alter the harvest cycle of a plant allowing plants to be sown later and/or harvested sooner than would otherwise be possible (a similar effect may be obtained with earlier flowering time). If the growth rate is sufficiently increased, it may allow for the further sowing of seeds of the same plant species (for example sowing and harvesting of rice plants followed by sowing and harvesting of further rice plants all within one conventional growing period). Similarly, if the growth rate is sufficiently increased, it may allow for the further sowing of seeds of different plants species (for example the sowing and harvesting of corn plants followed by, for example, the sowing and optional harvesting of soybean, potato or any other suitable plant). Harvesting additional times from the same rootstock in the case of some crop plants may also be possible. Altering the harvest cycle of a plant may lead to an increase in annual biomass production per acre (due to an increase in the number of times (say in a year) that any particular plant may be grown and harvested). An increase in growth rate may also allow for the cultivation of transgenic plants in a wider geographical area than their wild-type counterparts, since the territorial limitations for growing a crop are often determined by adverse environmental conditions either at the time of planting (early season) or at the time of harvesting (late season). Such adverse conditions may be avoided if the harvest cycle is shortened. The growth rate may be determined by deriving various parameters from growth curves, such parameters may be: T-Mid (the time taken for plants to reach 50% of their maximal size) and T-90 (time taken for plants to reach 90% of their maximal size), amongst others.

[0376] According to a preferred feature of the present invention, performance of the methods of the invention gives plants having an increased growth rate relative to control plants. Therefore, according to the present invention, there is provided a method for increasing the growth rate of plants, which method comprises modulating expression (preferably, increasing) in a plant of a nucleic acid sequence encoding a GRP polypeptide as defined herein.

[0377] An enhancement of yield-related traits (an increase in seed yield and/or growth rate) occurs whether the plant is under non-stress conditions or whether the plant is exposed to various stresses compared to control plants. Plants typically respond to exposure to stress by growing more slowly. In conditions of severe stress, the plant may even stop growing altogether. Mild stress on the other hand is defined herein as being any stress to which a plant is exposed which does not result in the plant ceasing to grow altogether without the capacity to resume growth. Mild stress in the sense of the invention leads to a reduction in the growth of the stressed plants of less than 40%, 35% or 30%, preferably less than 25%, 20% or 15%, more preferably less than 14%, 13%, 12%, 11% or 10% or less in comparison to the control plant under non-stress conditions. Due to advances in agricultural practices (irrigation, fertilization, pesticide treatments) severe stresses are not often encountered in cultivated crop plants. As a consequence, the compromised growth induced by mild stress is often an undesirable feature for agriculture. Mild stresses are the everyday biotic and/or abiotic (environmental) stresses to which a plant is exposed. Abiotic stresses may be due to drought or excess water, anaerobic stress, salt stress, chemical toxicity, oxidative stress and hot, cold or freezing temperatures. The abiotic stress may be an osmotic stress caused by a water stress (particularly due to drought), salt stress, oxidative stress or an ionic stress. Biotic stresses are typically those stresses caused by pathogens, such as bacteria, viruses, nematodes, fungi and insects. The term “non-stress” conditions as used herein are those environmental conditions that allow optimal growth of plants. Persons skilled in the art are aware of normal soil conditions and climatic conditions for a given location.

[0378] Performance of the methods of the invention gives plants grown under non-stress conditions or under mild stress conditions having enhanced yield-related traits, preferably enhanced seed yield-related traits, relative to control plants grown under comparable conditions. Therefore, according to the present invention, there is provided a method for enhancing yield-related traits, preferably enhanced seed yield-related traits, in plants grown under non-stress conditions or under mild stress conditions, which method comprises modulating (preferably, increasing) expression in a plant of a nucleic acid sequence encoding a GRP polypeptide.

[0379] Performance of the methods according to the present invention results in plants grown under abiotic stress conditions having enhanced yield-related traits, preferably enhanced seed yield-related traits, relative to control plants grown under comparable stress conditions. As reported in Wang et al. (Planta (2003) 218: 1-14), abiotic stress leads to a series of morphological, physiological, biochemical and molecular changes that adversely affect plant growth and productivity. Drought, salinity, extreme temperatures and oxidative stress are known to be interconnected and may induce growth and cellular damage through similar mechanisms. Rabbani et al. (Plant Physiol (2003) 133: 1755-1767) describes a particularly high degree of “cross talk” between drought stress and high-salinity stress. For example, drought and/or salinisation are manifested primarily as osmotic stress, resulting in the disruption of homeostasis and ion distribution in the cell. Oxidative stress, which frequently accompanies high or low temperature, salinity or drought stress, may cause denaturing of functional and structural proteins. As a consequence, these diverse environmental stresses often activate similar cell signalling pathways and cellular responses, such as the production of stress proteins, up-regulation of anti-oxidants, accumulation of compatible solutes and growth arrest. Since diverse environmental stresses activate similar pathways, plants having enhanced yield-related traits, preferably enhanced seed yield-related traits, under one type of abiotic stress growth conditions, relative to control plants grown under comparable abiotic stress conditions, should not be seen as a limitation to that type of abiotic stress growth conditions, but more as a screen to indicate the involvement of GRP polypeptides as defined above, in enhancing yield-related traits in abiotic stress growth conditions in general.

[0380] The term “abiotic stress” as defined herein is taken to mean any one or more of: water stress (due to drought or excess water), anaerobic stress, salt stress, temperature stress (due to hot, cold or freezing temperatures), chemical toxicity stress and oxidative stress. According to one aspect of the invention, the abiotic stress is an osmotic stress, selected from water stress, salt stress, oxidative stress and ionic stress. Preferably, the water stress is drought stress. The term salt stress is not restricted to common salt (NaCl), but may be any stress caused by one or more of: NaCl, KCl, LiCl, MgCl2, CaCl2, amongst others.

[0381] Performance of the methods of the invention gives plants having enhanced yield-related traits, preferably enhanced seed yield-related traits, under abiotic stress growth conditions relative to control plants grown in comparable stress conditions. Therefore, according to the present invention, there is provided a method for enhancing yield-related traits, preferably enhancing seed yield-related traits, in plants grown under abiotic stress growth conditions, which method comprises modulating (preferably, increasing) expression in a plant of a nucleic acid sequence encoding a GRP polypeptide. According to one aspect of the invention, the abiotic stress is an osmotic stress, selected from one or more of the following: water stress, salt stress, oxidative stress and ionic stress.

[0382] Performance of the methods of the invention gives plants grown under conditions of reduced nutrient availability, particularly under conditions of reduced nitrogen availability, enhanced yield-related traits, preferably enhancing seed yield-related traits, relative to control plants grown under comparable conditions. Therefore, according to the present invention, there is provided a method for enhancing yield-related traits in plants grown under conditions of reduced nutrient availability, which method comprises modulating (preferably, increasing) expression in a plant of a nucleic acid sequence encoding a GRP polypeptide. Reduced nutrient availability may comprise reduced availability of nutrients such as nitrogen, phosphates and other phosphorous-containing compounds, potassium, calcium, cadmium, magnesium, manganese, iron and boron, amongst others.

[0383] The present invention encompasses plants, parts thereof (including seeds), or plant cells obtainable by the methods according to the present invention. The plants, parts thereof, or plant cells comprise a nucleic acid transgene encoding a GRP polypeptide as defined above, preferably a basic-helix-loop-helix 4 (bHLH4) polypeptide.

[0384] The invention also provides genetic constructs and vectors to facilitate introduction and/or expression in plants of nucleic acid sequences encoding GRP polypeptides. The gene constructs may be inserted into vectors, which may be commercially available, suitable for transforming into plants and suitable for expression of the gene of interest in the transformed cells. The invention also provides use of a gene construct as defined herein in the methods of the invention.

[0385] More specifically, the present invention provides a construct comprising:
[0386] (a) a nucleic acid sequence encoding a GRP polypeptide, preferably a basic-helix-loop-helix 4 (bHLH4) polypeptide as defined above;
[0387] (b) one or more control sequences capable of driving expression of the nucleic acid sequence of (a); and optionally
[0388] (c) a transcription termination sequence.

[0389] Preferably, the nucleic acid sequence encoding a GRP polypeptide is as defined above. The term “control sequence” and “termination sequence” are as defined herein.

[0390] Plants are transformed with a vector comprising any of the nucleic acid sequences described above. The skilled artisan is well aware of the genetic elements that must be present on the vector in order to successfully transform, select and propagate host cells containing the sequence of interest. The sequence of interest is operably linked to one or more control sequences (at least to a promoter).

[0391] Advantageously, any type of promoter, whether natural or synthetic, may be used to drive expression of the nucleic acid sequence. A constitutive promoter is particularly useful in the methods of the invention. See the “Definitions” section herein for definitions of the various promoter types.

[0392] It should be clear that the applicability of the present invention is not restricted to the GRP polypeptide-encoding nucleic acid sequence represented by SEQ ID NO: 104, nor is the applicability of the invention restricted to expression of a GRP polypeptide-encoding nucleic acid sequence when driven by a constitutive promoter.

[0393] The constitutive promoter is preferably a high mobility group B (HMGB) promoter, preferably an HMGB promoter from rice. Further preferably the HMGB promoter is represented by a nucleic acid sequence substantially similar to SEQ ID NO: 106, most preferably the HMGB promoter is as represented by SEQ ID NO: 106. See Table 2 in the “Definitions” section herein for further examples of constitutive promoters.

[0394] Optionally, one or more terminator sequences may be used in the construct introduced into a plant. Additional regulatory elements may include transcriptional as well as translational enhancers. Those skilled in the art will be aware of terminator and enhancer sequences that may be suitable for use in performing the invention. An intron sequence may also be added to the 5′ untranslated region (UTR) or in the coding sequence to increase the amount of the mature message that accumulates in the cytosol, as described in the definitions section. Other control sequences (besides promoter, enhancer, silencer, intron sequences, 3′UTR and/or 5′UTR regions) may be protein and/or RNA stabilizing elements. Such sequences would be known or may readily be obtained by a person skilled in the art.

[0395] The genetic constructs of the invention may further include an origin of replication sequence that is required for maintenance and/or replication in a specific cell type. One example is when a genetic construct is required to be maintained in a bacterial cell as an episomal genetic element (e.g. plasmid or cosmid molecule). Preferred origins of replication include, but are not limited to, the f1-ori and colE1.

[0396] For the detection of the successful transfer of the nucleic acid sequences as used in the methods of the invention and/or selection of transgenic plants comprising these nucleic acid sequences, it is advantageous to use marker genes (or reporter genes). Therefore, the genetic construct may optionally comprise a selectable marker gene. Selectable markers are described in more detail in the “definitions” section herein. The marker genes may be removed or excised from the transgenic cell once they are no longer needed. Techniques for marker removal are known in the art, useful techniques are described above in the definitions section.

[0397] The invention also provides a method for the production of transgenic plants having enhanced yield-related traits, preferably enhanced seed yield-related traits, relative to control plants, comprising introduction and expression in a plant of a nucleic acid sequence encoding a GRP polypeptide as defined hereinabove.

[0398] More specifically, the present invention provides a method for the production of transgenic plants having enhanced yield-related traits, preferably enhanced seed yield-related traits, which method comprises:
[0399] (i) introducing and expressing in a plant, plant part, or plant cell, a nucleic acid sequence encoding a GRP polypeptide; and
[0400] (ii) cultivating the plant, plant part or plant cell under conditions promoting plant growth and development.

[0401] The nucleic acid sequence of (i) may be any of the nucleic acid sequences capable of encoding a GRP polypeptide as defined herein, in one embodiment having the activity of a basic-helix-loop-helix 4 (bHLH4) polypeptide.

[0402] The nucleic acid sequence may be introduced directly into a plant cell or into the plant itself (including introduction into a tissue, organ or any other part of a plant). According to a preferred feature of the present invention, the nucleic acid sequence is preferably introduced into a plant by transformation. The term “transformation” is described in more detail in the “definitions” section herein.

[0403] The genetically modified plant cells can be regenerated via all methods with which the skilled worker is familiar. Suitable methods can be found in the abovementioned publications by S. D. Kung and R. Wu, Potrykus or Hofgen and Willmitzer.

[0404] Generally after transformation, plant cells or cell groupings are selected for the presence of one or more markers which are encoded by plant-expressible genes co-transferred with the gene of interest, following which the transformed material is regenerated into a whole plant. To select transformed plants, the plant material obtained in the transformation is, as a rule, subjected to selective conditions so that transformed plants can be distinguished from untransformed plants. For example, the seeds obtained in the above-described manner can be planted and, after an initial growing period, subjected to a suitable selection by spraying. A further possibility consists in growing the seeds, if appropriate after sterilization, on agar plates using a suitable selection agent so that only the transformed seeds can grow into plants. Alternatively, the transformed plants are screened for the presence of a selectable marker such as the ones described above.

[0405] Following DNA transfer and regeneration, putatively transformed plants may also be evaluated, for instance using Southern analysis, for the presence of the gene of interest, copy number and/or genomic organisation. Alternatively or additionally, expression levels of the newly introduced DNA may be monitored using Northern and/or Western analysis, both techniques being well known to persons having ordinary skill in the art.

[0406] The generated transformed plants may be propagated by a variety of means, such as by clonal propagation or classical breeding techniques. For example, a first generation (or T1) transformed plant may be selfed and homozygous second-generation (or T2) transformants selected, and the T2 plants may then further be propagated through classical breeding techniques. The generated transformed organisms may take a variety of forms. For example, they may be chimeras of transformed cells and non-transformed cells; clonal transformants (e.g., all cells transformed to contain the expression cassette); grafts of transformed and untransformed tissues (e.g., in plants, a transformed rootstock grafted to an untransformed scion).

[0407] The present invention clearly extends to any plant cell or plant produced by any of the methods described herein, and to all plant parts and propagules thereof. The present invention extends further to encompass the progeny of a primary transformed or transfected cell, tissue, organ or whole plant that has been produced by any of the aforementioned methods, the only requirement being that progeny exhibit the same genotypic and/or phenotypic characteristic(s) as those produced by the parent in the methods according to the invention.

[0408] The invention also includes host cells containing an isolated nucleic acid sequence encoding a GRP polypeptide as defined hereinabove. Preferred host cells according to the invention are plant cells. Host plants for the nucleic acid transgene or the vector used in the method according to the invention, the expression cassette or construct or vector are, in principle, advantageously all plants, which are capable of synthesizing the polypeptides used in the inventive method.

[0409] The methods of the invention are advantageously applicable to any plant. Plants that are particularly useful in the methods of the invention include all plants which belong to the superfamily Viridiplantae, in particular monocotyledonous and dicotyledonous plants including fodder or forage legumes, ornamental plants, food crops, trees or shrubs. According to a preferred embodiment of the present invention, the plant is a crop plant. Examples of crop plants include soybean, sunflower, canola, alfalfa, rapeseed, cotton, tomato, potato and tobacco. Further preferably, the plant is a monocotyledonous plant. Examples of monocotyledonous plants include sugarcane. More preferably the plant is a cereal. Examples of cereals include rice, maize, wheat, barley, millet, rye, triticale, sorghum and oats.

[0410] The invention also extends to harvestable parts of a plant such as, but not limited to seeds, leaves, fruits, flowers, stems, roots, rhizomes, tubers and bulbs. The invention furthermore relates to products derived, preferably directly derived, from a harvestable part of such a plant, such as dry pellets or powders, oil, fat and fatty acids, starch or proteins.

[0411] According to a preferred feature of the invention, the modulated expression is increased expression. Methods for increasing expression of nucleic acid sequences or genes, or gene products, are well documented in the art and examples are provided in the definitions section.

[0412] As mentioned above, a preferred method for modulating (preferably, increasing) expression of a nucleic acid sequence encoding a GRP polypeptide is by introducing and expressing in a plant a nucleic acid sequence encoding a GRP polypeptide; however the effects of performing the method, i.e. enhancing yield-related traits, preferably enhancing seed yield-related traits, may also be achieved using other well known techniques, including but not limited to T-DNA activation tagging, TILLING, homologous recombination. A description of these techniques is provided in the definitions section.

[0413] The present invention also encompasses use of nucleic acid sequences encoding GRP polypeptides as described herein and use of these GRP polypeptides in enhancing any of the aforementioned yield-related traits, preferably seed yield-related traits, in plants.

[0414] Nucleic acid sequences encoding GRP polypeptide described herein, or the GRP polypeptides themselves, may find use in breeding programmes in which a DNA marker is identified which may be genetically linked to a GRP polypeptide-encoding gene. The genes/nucleic acid sequences, or the GRP polypeptides themselves may be used to define a molecular marker. This DNA or protein marker may then be used in breeding programmes to select plants having enhanced yield-related traits, preferably enhanced seed yield-related traits, as defined hereinabove in the methods of the invention.

[0415] Allelic variants of a GRP polypeptide-encoding nucleic acid sequence/gene may also find use in marker-assisted breeding programmes. Such breeding programmes sometimes require introduction of allelic variation by mutagenic treatment of the plants, using for example EMS mutagenesis; alternatively, the programme may start with a collection of allelic variants of so called “natural” origin caused unintentionally. Identification of allelic variants then takes place, for example, by PCR. This is followed by a step for selection of superior allelic variants of the sequence in question and which give enhanced yield-related traits, preferably enhanced seed yield-related traits. Selection is typically carried out by monitoring growth performance of plants containing different allelic variants of the sequence in question. Growth performance may be monitored in a greenhouse or in the field. Further optional steps include crossing plants in which the superior allelic variant was identified with another plant. This could be used, for example, to make a combination of interesting phenotypic features.

[0416] Nucleic acid sequences encoding GRP polypeptides may also be used as probes for genetically and physically mapping the genes that they are a part of, and as markers for traits linked to those genes. Such information may be useful in plant breeding in order to develop lines with desired phenotypes. Such use of GRP polypeptide-encoding nucleic acid sequences requires only a nucleic acid sequence of at least 15 nucleotides in length. The GRP polypeptide-encoding nucleic acid sequences may be used as restriction fragment length polymorphism (RFLP) markers. Southern blots (Sambrook J, Fritsch E F and Maniatis T (1989) Molecular Cloning, A Laboratory Manual) of restriction-digested plant genomic DNA may be probed with the GRP-encoding nucleic acid sequences. The resulting banding patterns may then be subjected to genetic analyses using computer programs such as MapMaker (Lander et al. (1987) Genomics 1: 174-181) in order to construct a genetic map. In addition, the nucleic acid sequences may be used to probe Southern blots containing restriction endonuclease-treated genomic DNAs of a set of individuals representing parent and progeny of a defined genetic cross. Segregation of the DNA polymorphisms is noted and used to calculate the position of the GRP polypeptide-encoding nucleic acid sequence in the genetic map previously obtained using this population (Botstein et al. (1980) Am. J. Hum. Genet. 32:314-331).

[0417] The production and use of plant gene-derived probes for use in genetic mapping is described in Bernatzky and Tanksley (1986) Plant Mol. Biol. Reporter 4: 37-41. Numerous publications describe genetic mapping of specific cDNA clones using the methodology outlined above or variations thereof. For example, F2 intercross populations, backcross populations, randomly mated populations, near isogenic lines, and other sets of individuals may be used for mapping. Such methodologies are well known to those skilled in the art.

[0418] The nucleic acid sequence probes may also be used for physical mapping (i.e., placement of sequences on physical maps; see Hoheisel et al. In: Non-mammalian Genomic Analysis: A Practical Guide, Academic press 1996, pp. 319-346, and references cited therein).

[0419] In another embodiment, the nucleic acid sequence probes may be used in direct fluorescence in situ hybridisation (FISH) mapping (Trask (1991) Trends Genet. 7:149-154). Although current methods of FISH mapping favour use of large clones (several kb to several hundred kb; see Laan et al. (1995) Genome Res. 5:13-20), improvements in sensitivity may allow performance of FISH mapping using shorter probes.

[0420] A variety of nucleic acid sequence amplification-based methods for genetic and physical mapping may be carried out using the nucleic acid sequences. Examples include allele-specific amplification (Kazazian (1989) J. Lab. Clin. Med 11:95-96), polymorphism of PCR-amplified fragments (CAPS; Sheffield et al. (1993) Genomics 16:325-332), allele-specific ligation (Landegren et al. (1988) Science 241:1077-1080), nucleotide extension reactions (Sokolov (1990) Nucleic Acids Res. 18:3671), Radiation Hybrid Mapping (Walter et al. (1997) Nat. Genet. 7:22-28) and Happy Mapping (Dear and Cook (1989) Nucleic Acids Res. 17:6795-6807). For these methods, the sequence of a nucleic acid sequence is used to design and produce primer pairs for use in the amplification reaction or in primer extension reactions. The design of such primers is well known to those skilled in the art. In methods employing PCR-based genetic mapping, it may be necessary to identify DNA sequence differences between the parents of the mapping cross in the region corresponding to the instant nucleic acid sequence. This, however, is generally not necessary for mapping methods.

[0421] The methods according to the present invention result in plants having enhanced yield-related traits, preferably enhanced seed yield-related traits, as described hereinbefore. These traits may also be combined with other economically advantageous traits, such as further yield-enhancing traits, tolerance to other abiotic and biotic stresses, traits modifying various architectural features and/or biochemical and/or physiological features.

[0422] The term “table A3” used in this specification is to be taken to specify the content of table A3a and table A3b. The term “table A3a” used in this specification is to be taken to specify the content of table A3a. The term “table A3b” used in this specification is to be taken to specify the content of table A3b. In one preferred embodiment, the term “table A3” means table A3b.

[0423] In one embodiment the invention relates to subject mater summarized as follows:

[0424] Item 42: A method for enhancing yield-related traits, preferably enhancing seed yield-related traits, in plants relative to control plants, comprising modulating expression (preferably, increasing) in a plant of a nucleic acid sequence encoding a GRP polypeptide, wherein said GRP polypeptide is a basic-helix-loop-helix 4 (bHLH4) polypeptide as represented by SEQ ID NO: 2 or any of the polypeptides given in table A3 or an orthologue, paralogue, or homologue thereof, and optionally selecting for plants having enhanced yield-related traits, preferably enhanced seed yield-related traits.

[0425] Item 43: A method according to item 42, wherein said GRP polypeptide as represented by SEQ ID NO: 105 and an orthologue, paralogue, or homologue thereof, have a basic-helix-loop-helix dimerisation region with InterPro entry IPR001092, and helix-loop-helix DNA-binding with InterPro entry IPR011598.

Item 44: Method according to item 42 or 43, wherein said GRP polypeptide has in increasing order of preference at least 50%, 55%, 60%, 65%, 70%, 75%, 80%, 85%, 90%, 95%, 98%, 99% or more amino acid sequence identity to the GRP polypeptide as represented by SEQ ID NO: 105 or to any of the polypeptide sequences given in Table A3 of Example 1.
Item 45: Method according to any preceding item 42 to 44, wherein said nucleic acid sequence encoding a GRP polypeptide is represented by the nucleic acid sequence of SEQ ID NO: 104 or a portion thereof, or a sequence capable of hybridising with the nucleic acid sequence of SEQ ID NO: 104 or a portion thereof or a sequence capable of hybridising with any one of the nucleic acid sequences SEQ ID NOs given in Table A3 of Example 1.
Item 46: Method according to any preceding item 42 to 45 wherein said modulated expression (preferably, increased) is effected by introducing and expressing in a plant a nucleic acid sequence encoding said GRP polypeptide.
Item 47: Method according to any preceding item 42 to 46, wherein said enhanced yield-related traits comprise one or more of: increased early vigour, increased greenness index, increased total seed yield per plant, increased number of filled seeds, increased seed fill rate, and increased harvest index, relative to control plants.
Item 48: Method according to any preceding item 42 to 47, wherein said modulated expression is increased expression.
Item 49: Method according to any preceding item 42 to 48, wherein said nucleic acid sequence is operably linked to a constitutive promoter, preferably to a high mobility group B (HMGB) promoter, most preferably to an HMGB promoter from rice.
Item 50: Method according to any preceding item 42 to 49, wherein said nucleic acid sequence encoding a GRP polypeptide is of plant origin, preferably from a dicotyledonous plant, further preferably from the family Brassicaceae, more preferably from Arabidopsis thaliana.
Item 51: Plant, part thereof (including seeds), or plant cell obtainable by a method according to any preceding item 42 to 45, wherein said plant, part thereof, or plant cell comprises a nucleic acid transgene encoding a GRP polypeptide.
Item 52: An isolated nucleic acid sequence comprising a nucleic acid sequence selected from the group consisting of:
[0426] (a) an isolated nucleic acid molecule encoding the polypeptide as depicted in SEQ ID NO: 122, 124, 126, 128 and/or 130 and/or table A3b;
[0427] (b) an isolated nucleic acid molecule as depicted in SEQ ID NO:121, 123, 125, 127 and/or 129 and/or table A3b;
[0428] (c) an isolated nucleic acid molecule, which, as a result of the degeneracy of the genetic code, can be derived from a polypeptide sequence depicted in table A3 and confers enhanced yield-related traits relative to control plants;
[0429] (d) an isolated nucleic acid molecule having at least 30%, 31%, 32%, 33%, 34%, 35%, 36%, 37%, 38%, 39%, 40%, 41%, 42%, 43%, 44%, 45%, 46%, 47%, 48%, 49%, 50%, 51%, 52%, 53%, 54%, 55%, 56%, 57%, 58%, 59%, 60%, 61%, 62%, 63%, 64%, 65%, 66%, 67%, 68%, 69%, 70%, 71%, 72%, 73%, 74%, 75%, 76%, 77%, 78%, 79%, 80%, 81%, 82%, 83%, 84%, 85%, 86%, 87%, 88%, 89%, 90%, 91%, 92%, 93%, 94%, 95%, 96%, 97%, 98%, or 99% sequence identity with the nucleic acid molecule sequence of a polynucleotide comprising the nucleic acid molecule depicted in table A3 and confers enhanced yield-related traits relative to control plants;
[0430] (e) an isolated nucleic acid molecule encoding a polypeptide having at least 30%, 31%, 32%, 33%, 34%, 35%, 36%, 37%, 38%, 39%, 40%, 41%, 42%, 43%, 44%, 45%, 46%, 47%, 48%, 49%, 50%, 51%, 52%, 53%, 54%, 55%, 56%, 57%, 58%, 59%, 60%, 61%, 62%, 63%, 64%, 65%, 66%, 67%, 68%, 69%, 70%, 71%, 72%, 73%, 74%, 75%, 76%, 77%, 78%, 79%, 80%, 81%, 82%, 83%, 84%, 85%, 86%, 87%, 88%, 89%, 90%, 91%, 92%, 93%, 94%, 95%, 96%, 97%, 98%, or 99% sequence identity with the amino acid sequence of the polypeptide encoded by the nucleic acid molecule of (a) to (c) and confers enhanced yield-related traits relative to control plants;
[0431] (f) an isolated nucleic acid molecule which hybridizes with a nucleic acid molecule of (a) to (c) under stringent hybridization conditions and confers enhanced yield-related traits relative to control plants;
[0432] (g) an isolated nucleic acid molecule encoding a polypeptide comprising the consensus sequence or one or more polypeptide motifs as shown FIG. 10 and preferably having the activity represented by a nucleic acid molecule comprising a polynucleotide as depicted in table A3;
[0433] (h) an isolated nucleic acid molecule encoding a polypeptide having the activity represented by a protein as depicted in table A3 and confering enhanced yield-related traits relative to control plants;
[0434] and
[0435] (i) a nucleic acid molecule which is obtainable by screening a suitable nucleic acid library under stringent hybridization conditions with a probe comprising a complementary sequence of a nucleic acid molecule of (a) or (b) or with a fragment thereof, having at least 15 nt, preferably 20 nt, 30 nt, 50 nt, 100 nt, 200 nt or 500 nt of a nucleic acid molecule complementary to a nucleic acid molecule sequence characterized in (a) to (e) and encoding a polypeptide having the activity represented by a protein comprising a polypeptide as depicted in table A3;
[0436] whereby the nucleic acid molecule according to (a) to (i) is at least in one or more nucleotides different from the sequence depicted in table A3a and preferably which encodes a protein which differs at least in one or more amino acids from the protein sequences depicted in table A3a.
   Item 53: Construct comprising:
[0437] (a) nucleic acid sequence encoding a GRP polypeptide as defined in item 42 to 44 or 52; one or more control sequences capable of driving expression of the nucleic acid sequence of (a); and optionally
[0438] (b) a transcription termination sequence.
   Item 54: Construct according to item 53, wherein one of said control sequences is a constitutive promoter, preferably an HMGB promoter, most preferably an HMGB promoter from rice.
   Item 55: Use of a construct according to any of items 53 to 54 in a method for making plants having enhanced yield-related traits, particularly increased early vigour, increased greenness index, increased total seed yield per plant, increased number of filled seeds, increased seed fill rate, and increased harvest index, relative to control plants.
   Item 56: Plant, plant part or plant cell transformed with a construct according to any of items 53 to 54.
   Item 57: Method for the production of a transgenic plant having enhanced-yield related traits relative to control plants, comprising:
[0439] (i) introducing and expressing in a plant, plant part, or plant cell, a nucleic acid sequence encoding a GRP polypeptide as defined in items 42 to 44 and 52; and
[0440] (ii) cultivating the plant, plant part, or plant cell under conditions promoting plant growth and development.
   Item 58: Transgenic plant having enhanced yield-related traits, particularly increased early vigour, increased greenness index, increased total seed yield per plant, increased number of filled seeds, increased seed fill rate, and increased harvest index, relative to control plants, resulting from increased expression of a nucleic acid sequence encoding a GRP polypeptide as defined in items 42 to 44 and 52, or a transgenic plant cell derived from said transgenic plant.
   Item 59: Transgenic plant according to items 51, 56 and 58, or a transgenic plant cell derived thereof, wherein said plant is a crop plant or a monocot or a cereal, such as rice, maize, wheat, barley, millet, rye, triticale, sorghum and oats.
   Item 60: Harvestable parts of a plant comprising a nucleic acid sequence encoding a GRP polypeptide according to item 59, wherein said harvestable parts are preferably seeds.
   Item 61: Products derived from a plant according to item 59 and/or from harvestable parts of a plant according to item 60.
   Item 62: Use of a nucleic acid sequence encoding a GRP polypeptide in enhancing yield-related traits in plants, particularly in increasing early vigour, increasing greenness index, increasing total seed yield per plant, increasing number of filled seeds, increasing seed fill rate, and increasing harvest index, relative to control plants.

[0441] According to a further embodiment of the present invention, there is also provided an isolated polypeptide comprising a polypeptide sequence selected from the group consisting of:

(i) an amino acid sequence encoded by any one of the nucleic acids represented by Item 52;
(ii) an amino acid sequence having, in increasing order of preference, at least 50%, 55%, 60%, 65%, 70%, 75%, 80%, 85%, 90%, 95%, 96%, 97%, 98%, 99% or more sequence identity to the amino acid sequence of (i);
(iii) derivatives of any of the amino acid sequences given in (i) or (ii) above.

[0442] In one embodiment of the invention it has now been found that modulating expression (preferably, increasing) in a plant of a nucleic acid sequence encoding a GRP polypeptide, wherein said GRP polypeptide is an isopentenyl transferase (IPT) polypeptide, gives plants having enhanced yield-related traits relative to control plants. According to a first embodiment, the present invention provides a method for enhancing yield-related traits in plants relative to control plants, comprising modulating expression (preferably, increasing) in a plant of a nucleic acid sequence encoding a GRP polypeptide, wherein said GRP polypeptide is an isopentenyl transferase (IPT) polypeptide.

[0443] A preferred method for modulating (preferably, increasing) expression of a nucleic acid sequence encoding a GRP polypeptide is by introducing and expressing in a plant a nucleic acid sequence encoding a GRP polypeptide.

[0444] Any reference hereinafter to a “protein useful in the methods of the invention” is taken to mean a GRP polypeptide as defined herein. Any reference hereinafter to a “nucleic acid sequence useful in the methods of the invention” is taken to mean a nucleic acid sequence capable of encoding such a GRP polypeptide. The nucleic acid sequence to be introduced into a plant (and therefore useful in performing the methods of the invention) is any nucleic acid sequence encoding the type of protein which will now be described, hereafter also named “GRP nucleic acid sequence” or “GRP gene”.

[0445] A “GRP polypeptide” as defined herein refers the polypeptides represented by SEQ ID NO: 132, and to orthologues, paralogues, and homologues thereof or any of the polypeptide sequences given in Table A4 of Example 1 herein.

[0446] Preferably, the orthologues, paralogues, and homologues of SEQ ID NO: 132 belong to the tRNA isopentenyltransferase family with InterPro entries IPR002627 and IPR011593.

[0447] Alternatively or additionally, a “GRP polypeptide” as defined herein refers to any polypeptide having in increasing order of preference at least 50%, 55%, 60%, 65%, 70%, 75%, 80%, 85%, 90%, 95%, 98%, 99% or more amino acid sequence identity to the GRP polypeptide as represented by SEQ ID NO: 132 or to any of the polypeptide sequences given in Table A4 of Example 1 herein.

[0448] The term “domain” and “motif” is defined in the “definitions” section herein. Specialist databases exist for the identification of domains, for example, SMART (Schultz et al. (1998) Proc. Natl. Acad. Sci. USA 95, 5857-5864; Letunic et al. (2002) Nucleic Acids Res 30, 242-244), InterPro (Mulder et al., (2003) Nucl. Acids. Res. 31, 315-318), Prosite (Bucher and Bairoch (1994), A generalized profile syntax for biomolecular sequences motifs and its function in automatic sequence interpretation. (In) ISMB-94; Proceedings 2nd International Conference on Intelligent Systems for Molecular Biology. Altman R., Brutlag D., Karp P., Lathrop R., Searls D., Eds., pp 53-61, AAAI Press, Menlo Park; Hulo et al., Nucl. Acids. Res. 32:D134-D137, (2004) ), or Pfam (Bateman et al., Nucleic Acids Research 30(1): 276-280 (2002) ). A set of tools for in silico analysis of protein sequences is available on the ExPASy proteomics server (Swiss Institute of Bioinformatics (Gasteiger et al., ExPASy: the proteomics server for in-depth protein knowledge and analysis, Nucleic Acids Res. 31:3784-3788 (2003) ). Domains or motifs may also be identified using routine techniques, such as by sequence alignment.

[0449] Methods for the alignment of sequences for comparison are well known in the art, such methods include GAP, BESTFIT, BLAST, FASTA and TFASTA. GAP uses the algorithm of Needleman and Wunsch ((1970) J Mol Biol 48: 443-453) to find the global (i.e. spanning the complete sequences) alignment of two sequences that maximizes the number of matches and minimizes the number of gaps. The BLAST algorithm (Altschul et al. (1990) J Mol Biol 215: 403-10) calculates percent sequence identity and performs a statistical analysis of the similarity between the two sequences. The software for performing BLAST analysis is publicly available through the National Centre for Biotechnology Information (NCBI). Homologues may readily be identified using, for example, the ClustalW multiple sequence alignment algorithm (version 1.83), with the default pairwise alignment parameters, and a scoring method in percentage. Global percentages of similarity and identity may also be determined using one of the methods available in the MatGAT software package (Campanella et al., BMC Bioinformatics. 2003 Jul. 10; 4:29. MatGAT: an application that generates similarity/identity matrices using protein or DNA sequences). Minor manual editing may be performed to optimise alignment between conserved motifs, as would be apparent to a person skilled in the art. Furthermore, instead of using full-length sequences for the identification of homologues, specific domains may also be used. The sequence identity values may be determined over the entire nucleic acid sequence or polypeptide sequence or over selected domains or conserved motif(s), using the programs mentioned above using the default parameters.

[0450] Cytokinins, which are central regulators of cell division and differentiation in plants, are adenine derivatives carrying an isopentenyl side chain that may be hydroxylated. Plants have two classes of isopentenyltransferases (IPTs) acting on the adenine moiety: ATP/ADP isopentenyltransferases (in Arabidopsis thaliana, AtlPT1, 3, 4-8) and tRNA IPTs (in Arabidopsis, AtlPT2 and 9; Miyawaki et al. (2006) Proc Natl Acad Sci USA. 103(44): 16598-16603.). As described above, isopentenylation of ATP and ADP, by ATP/ADP IPTs, is the key step in the biosynthesis of iP- and tZ-type cytokinins. GRP polypeptides, as far as SEQ ID NO: 2, and its orthologues, paralogues, and homologues are concerned, typically are responsible for the isopentenylation of ATP and ADP in the biosynthesis of iP- and tZ-type cytokinins. Measuring such enzymatic activity is well known in the art (for example, Miyawaki et al. supra).

[0451] The present invention is illustrated by transforming plants with the nucleic acid sequence represented by SEQ ID NO: 131, encoding the polypeptide sequence of SEQ ID NO: 132. However, performance of the invention is not restricted to these sequences; the methods of the invention may advantageously be performed using any GRP-encoding nucleic acid sequence or GRP polypeptide as defined herein.

[0452] Examples of nucleic acid sequences encoding GRP polypeptides may be found in databases known in the art. Such nucleic acid sequences are useful in performing the methods of the invention. Orthologues and paralogues, the terms “orthologues” and “paralogues” being as defined herein, may readily be identified by performing a so-called reciprocal blast search. Typically, this involves a first BLAST involving BLASTing a query sequence (for example using SEQ ID NO: 132) against any sequence database, such as the publicly available NCBI database. BLASTN or TBLASTX (using standard default values) are generally used when starting from a nucleotide sequence, and BLASTP or TBLASTN (using standard default values) when starting from a protein sequence. The BLAST results may optionally be filtered. The full-length sequences of either the filtered results or non-filtered results are then BLASTed back (second BLAST) against sequences from the organism from which the query sequence is derived (where the query sequence is SEQ ID NO: 131 or SEQ ID NO: 132, the second BLAST would therefore be against Arabidopsis thaliana sequences). The results of the first and second BLASTs are then compared. A paralogue is identified if a high-ranking hit from the first blast is from the same species as from which the query sequence is derived, a BLAST back then ideally results in the query sequence amongst the highest hits; an orthologue is identified if a high-ranking hit in the first BLAST is not from the same species as from which the query sequence is derived, and preferably results upon BLAST back in the query sequence being among the highest hits.

[0453] High-ranking hits are those having a low E-value. The lower the E-value, the more significant the score (or in other words the lower the chance that the hit was found by chance). Computation of the E-value is well known in the art. In addition to E-values, comparisons are also scored by percentage identity. Percentage identity refers to the number of identical nucleotides (or amino acids) between the two compared nucleic acid sequence (or polypeptide) sequences over a particular length. In the case of large families, ClustalW may be used, followed by a neighbour joining tree, to help visualize clustering of related genes and to identify orthologues and paralogues.

[0454] Nucleic acid sequence variants encoding homologues and derivatives of SEQ ID NO: 132 may also be useful in practising the methods of the invention, the terms “homologue” and “derivative” being as defined herein. Also useful in the methods of the invention are nucleic acid sequences encoding homologues and derivatives of orthologues or paralogues of SEQ ID NO: 132 or of any of the polypeptide sequences given in Table A4 of Example 1. Homologues and derivatives useful in the methods of the present invention have substantially the same biological and functional activity as the unmodified protein from which they are derived.

[0455] Further nucleic acid sequence variants useful in practising the methods of the invention include portions of nucleic acid sequences encoding GRP polypeptides, nucleic acid sequences hybridising to nucleic acid sequences encoding GRP polypeptides, splice variants of nucleic acid sequences encoding GRP polypeptides, allelic variants of nucleic acid sequences encoding GRP polypeptides and variants of nucleic acid sequences encoding GRP polypeptides obtained by gene shuffling. The terms hybridising sequence, splice variant, allelic variant and gene shuffling are as described herein.

[0456] Nucleic acid sequences encoding GRP polypeptides need not be full-length nucleic acid sequences, since performance of the methods of the invention does not rely on the use of full-length nucleic acid sequences. According to the present invention, there is provided a method for enhancing yield-related traits in plants, comprising introducing and expressing in a plant a portion of SEQ ID NO: 131, or a portion of a nucleic acid sequence encoding an orthologue, paralogue, or homologue of SEQ ID NO: 132.

[0457] A portion of a nucleic acid sequence may be prepared, for example, by making one or more deletions to the nucleic acid sequence. The portions may be used in isolated form or they may be fused to other coding (or non-coding) sequences in order to, for example, produce a protein that combines several activities. When fused to other coding sequences, the resultant polypeptide produced upon translation may be bigger than that predicted for the polypeptide portion.

[0458] Portions useful in the methods of the invention, encode a GRP polypeptide as defined herein, and have substantially the same biological activity as the polypeptide sequence given in SEQ ID NO: 132 or as any of the polypeptide sequences given in Table A4 of Example 1. Preferably, the portion is a portion of the nucleic acid sequence given in SEQ ID NO: 131, or is a portion of a nucleic acid sequence encoding an orthologue or paralogue of the polypeptide sequence given in SEQ ID NO: 132. Preferably the portion is at least 300, 400, 500, 600, 700, 800, 850, 900, 950, 1000, 1050, or more consecutive nucleotides in length, the consecutive nucleotides being of SEQ ID NO: 131, or of a nucleic acid sequence encoding an orthologue or paralogue of SEQ ID NO: 132. Most preferably the portion is a portion of the nucleic acid sequence of SEQ ID NO: 131.

[0459] Another nucleic acid sequence variant useful in the methods of the invention is a nucleic acid sequence capable of hybridising, under reduced stringency conditions, preferably under stringent conditions, with a nucleic acid sequence encoding a GRP polypeptide as defined herein, or with a portion as defined herein.

[0460] According to the present invention, there is provided a method for enhancing yield-related traits in plants comprising introducing and expressing in a plant a nucleic acid sequence capable of hybridizing to SEQ ID NO: 131, or comprising introducing and expressing in a plant a nucleic acid sequence capable of hybridising to a nucleic acid sequence encoding an orthologue, paralogue, or homologue of SEQ ID NO: 132 or of any of the polypeptide sequences given in Table A of Example 1.

[0461] Hybridising sequences useful in the methods of the invention encode a GRP polypeptide as defined herein, having substantially the same biological activity as the polypeptide sequence given in SEQ ID NO: 132. Preferably, the hybridising sequence is capable of hybridising to SEQ ID NO: 131, or to a portion of this sequence, a portion being as defined above, or the hybridising sequence is capable of hybridising to a nucleic acid sequence encoding an orthologue or paralogue of SEQ ID NO: 132, or to a portion thereof or to any of the polypeptide sequences given in Table A of Example 1.

[0462] Another nucleic acid sequence variant useful in the methods of the invention is a splice variant encoding a GRP polypeptide as defined hereinabove, a splice variant being as defined herein.

[0463] According to the present invention, there is provided a method for enhancing yield-related traits in plants, comprising introducing and expressing in a plant a splice variant of SEQ ID NO: 131, or a splice variant of a nucleic acid sequence encoding an orthologue, paralogue, or homologue of SEQ ID NO: 132.

[0464] Another nucleic acid sequence variant useful in performing the methods of the invention is an allelic variant of a nucleic acid sequence encoding a GRP polypeptide as defined hereinabove, an allelic variant being as defined herein.

[0465] According to the present invention, there is provided a method for enhancing yield-related traits in plants comprising introducing and expressing in a plant an allelic variant of SEQ ID NO: 131, or comprising introducing and expressing in a plant an allelic variant of a nucleic acid sequence encoding an orthologue, paralogue, or homologue of the polypeptide sequence represented by SEQ ID NO: 132.

[0466] The allelic variants useful in the methods of the present invention have substantially the same biological activity as the GRP polypeptide of SEQ ID NO: 132. Allelic variants exist in nature, and encompassed within the methods of the present invention is the use of these natural alleles. Gene shuffling or directed evolution may also be used to generate variants of nucleic acid sequences encoding GRP polypeptides as defined above; the term “gene shuffling” being as defined herein.

[0467] According to the present invention, there is provided a method for enhancing yield-related traits in plants comprising introducing and expressing in a plant a variant nucleic acid sequence of SEQ ID NO: 131, or comprising introducing and expressing in a plant a variant of a nucleic acid sequence encoding an orthologue, paralogue, or homologue of SEQ ID NO: 132, which variant nucleic acid sequence is obtained by gene shuffling.

[0468] Furthermore, nucleic acid sequence variants may also be obtained by site-directed mutagenesis. Several methods are available to achieve site-directed mutagenesis, the most common being PCR based methods (Current Protocols in Molecular Biology. Wiley Eds.).

[0469] Nucleic acid sequences encoding GRP polypeptides may be derived from any natural or artificial source. The nucleic acid sequence may be modified from its native form in composition and/or genomic environment through deliberate human manipulation. Preferably the GRP polypeptide-encoding nucleic acid sequence is from a plant. In the case of SEQ ID NO: 131, the GRP polypeptide encoding nucleic acid sequence is preferably from a dicotyledonous plant, more preferably from the family Brassicaceae, most preferably the nucleic acid sequence is from Arabidopsis thaliana.

[0470] Performance of the methods of the invention gives plants having enhanced yield-related traits, preferably enhanced seed yield-related traits. The terms “yield” and “seed yield” are described in more detail in the “definitions” section herein.

[0471] Reference herein to enhanced yield-related traits is taken to mean an increase in early vigour and/or in biomass (weight) of one or more parts of a plant, which may include aboveground (harvestable) parts and/or (harvestable) parts below ground. In particular, such harvestable parts are biomass and/or seeds, and performance of the methods of the invention results in plants having increased early vigour, biomass and/or seed yield relative to the early vigour, biomass or seed yield of control plants.

[0472] Taking corn as an example, a yield increase may be manifested as one or more of the following: increase in the number of plants established per hectare or acre, an increase in the number of ears per plant, an increase in the number of rows, number of kernels per row, kernel weight, thousand kernel weight, ear length/diameter, increase in the seed filling rate (which is the number of filled seeds divided by the total number of seeds and multiplied by 100), among others. Taking rice as an example, a yield increase may manifest itself as an increase in one or more of the following: number of plants per hectare or acre, number of panicles per plant, number of spikelets per panicle, number of flowers (florets) per panicle (which is expressed as a ratio of the number of filled seeds over the number of primary panicles), increase in the seed filling rate (which is the number of filled seeds divided by the total number of seeds and multiplied by 100), increase in thousand kernel weight, among others.

[0473] The present invention provides a method for enhancing yield-related traits, especially biomass and/or seed yield of plants, relative to control plants, which method comprises modulating expression (preferably, increasing) in a plant of a nucleic acid sequence encoding a GRP polypeptide as defined herein.

[0474] Since the transgenic plants according to the present invention have enhanced yield-related traits, it is likely that these plants exhibit an increased growth rate (during at least part of their life cycle), relative to the growth rate of control plants at a corresponding stage in their life cycle.

[0475] The increased growth rate may be specific to one or more parts of a plant (including seeds), or may be throughout substantially the whole plant. Plants having an increased growth rate may have a shorter life cycle. The life cycle of a plant may be taken to mean the time needed to grow from a dry mature seed up to the stage where the plant has produced dry mature seeds, similar to the starting material. This life cycle may be influenced by factors such as early vigour, growth rate, greenness index, flowering time and speed of seed maturation. The increase in growth rate may take place at one or more stages in the life cycle of a plant or during substantially the whole plant life cycle. Increased growth rate during the early stages in the life cycle of a plant may reflect enhanced vigour. The increase in growth rate may alter the harvest cycle of a plant allowing plants to be sown later and/or harvested sooner than would otherwise be possible (a similar effect may be obtained with earlier flowering time). If the growth rate is sufficiently increased, it may allow for the further sowing of seeds of the same plant species (for example sowing and harvesting of rice plants followed by sowing and harvesting of further rice plants all within one conventional growing period). Similarly, if the growth rate is sufficiently increased, it may allow for the further sowing of seeds of different plants species (for example the sowing and harvesting of corn plants followed by, for example, the sowing and optional harvesting of soybean, potato or any other suitable plant). Harvesting additional times from the same rootstock in the case of some crop plants may also be possible. Altering the harvest cycle of a plant may lead to an increase in annual biomass production per acre (due to an increase in the number of times (say in a year) that any particular plant may be grown and harvested). An increase in growth rate may also allow for the cultivation of transgenic plants in a wider geographical area than their wild-type counterparts, since the territorial limitations for growing a crop are often determined by adverse environmental conditions either at the time of planting (early season) or at the time of harvesting (late season). Such adverse conditions may be avoided if the harvest cycle is shortened. The growth rate may be determined by deriving various parameters from growth curves, such parameters may be: T-Mid (the time taken for plants to reach 50% of their maximal size) and T-90 (time taken for plants to reach 90% of their maximal size), amongst others.

[0476] According to a preferred feature of the present invention, performance of the methods of the invention gives plants having an increased growth rate relative to control plants. Therefore, according to the present invention, there is provided a method for increasing the growth rate of plants, which method comprises modulating expression (preferably, increasing) in a plant of a nucleic acid sequence encoding a GRP polypeptide as defined herein.

[0477] An enhancement of yield-related traits (an increase in seed yield and/or growth rate) occurs whether the plant is under non-stress conditions or whether the plant is exposed to various stresses compared to control plants. Plants typically respond to exposure to stress by growing more slowly. In conditions of severe stress, the plant may even stop growing altogether. Mild stress on the other hand is defined herein as being any stress to which a plant is exposed which does not result in the plant ceasing to grow altogether without the capacity to resume growth. Mild stress in the sense of the invention leads to a reduction in the growth of the stressed plants of less than 40%, 35% or 30%, preferably less than 25%, 20% or 15%, more preferably less than 14%, 13%, 12%, 11% or 10% or less in comparison to the control plant under non-stress conditions. Due to advances in agricultural practices (irrigation, fertilization, pesticide treatments) severe stresses are not often encountered in cultivated crop plants. As a consequence, the compromised growth induced by mild stress is often an undesirable feature for agriculture. Mild stresses are the everyday biotic and/or abiotic (environmental) stresses to which a plant is exposed. Abiotic stresses may be due to drought or excess water, anaerobic stress, salt stress, chemical toxicity, oxidative stress and hot, cold or freezing temperatures. The abiotic stress may be an osmotic stress caused by a water stress (particularly due to drought), salt stress, oxidative stress or an ionic stress. Biotic stresses are typically those stresses caused by pathogens, such as bacteria, viruses, nematodes, fungi and insects. The term “non-stress” conditions as used herein are those environmental conditions that allow optimal growth of plants. Persons skilled in the art are aware of normal soil conditions and climatic conditions for a given location.

[0478] Performance of the methods of the invention gives plants grown under non-stress conditions or under mild stress conditions having enhanced yield-related traits relative to control plants grown under comparable conditions. Therefore, according to the present invention, there is provided a method for enhancing yield-related traits in plants grown under non-stress conditions or under mild stress conditions, which method comprises modulating (preferably, increasing) expression in a plant of a nucleic acid sequence encoding a GRP polypeptide.

[0479] Performance of the methods according to the present invention results in plants grown under abiotic stress conditions having enhanced yield-related traits relative to control plants grown under comparable stress conditions. As reported in Wang et al. (Planta (2003) 218: 1-14), abiotic stress leads to a series of morphological, physiological, biochemical and molecular changes that adversely affect plant growth and productivity. Drought, salinity, extreme temperatures and oxidative stress are known to be interconnected and may induce growth and cellular damage through similar mechanisms. Rabbani et al. (Plant Physiol (2003) 133: 1755-1767) describes a particularly high degree of “cross talk” between drought stress and high-salinity stress. For example, drought and/or salinisation are manifested primarily as osmotic stress, resulting in the disruption of homeostasis and ion distribution in the cell. Oxidative stress, which frequently accompanies high or low temperature, salinity or drought stress, may cause denaturing of functional and structural proteins. As a consequence, these diverse environmental stresses often activate similar cell signalling pathways and cellular responses, such as the production of stress proteins, up-regulation of anti-oxidants, accumulation of compatible solutes and growth arrest. Since diverse environmental stresses activate similar pathways, plants having enhanced yield-related traits, preferably enhanced seed yield-related traits, under one type of abiotic stress growth conditions, relative to control plants grown under comparable abiotic stress conditions, should not be seen as a limitation to that type of abiotic stress growth conditions, but more as a screen to indicate the involvement of GRP polypeptides as defined above, in enhancing yield-related traits in abiotic stress growth conditions in general.

[0480] The term “abiotic stress” as defined herein is taken to mean any one or more of: water stress (due to drought or excess water), anaerobic stress, salt stress, temperature stress (due to hot, cold or freezing temperatures), chemical toxicity stress and oxidative stress. According to one aspect of the invention, the abiotic stress is an osmotic stress, selected from water stress, salt stress, oxidative stress and ionic stress. Preferably, the water stress is drought stress. The term salt stress is not restricted to common salt (NaCl), but may be any stress caused by one or more of: NaCl, KCl, LiCl, MgCl2, CaCl2, amongst others.

[0481] Performance of the methods of the invention gives plants having enhanced yield-related traits under abiotic stress growth conditions relative to control plants grown in comparable stress conditions. Therefore, according to the present invention, there is provided a method for enhancing yield-related traits in plants grown under abiotic stress growth conditions, which method comprises modulating (preferably, increasing) expression in a plant of a nucleic acid sequence encoding a GRP polypeptide. According to one aspect of the invention, the abiotic stress is an osmotic stress, selected from one or more of the following: water stress, salt stress, oxidative stress and ionic stress.

[0482] Performance of the methods of the invention gives plants grown under conditions of reduced nutrient availability, particularly under conditions of reduced nitrogen availability, enhanced yield-related traits relative to control plants grown under comparable conditions. Therefore, according to the present invention, there is provided a method for enhancing yield-related traits in plants grown under conditions of reduced nutrient availability, which method comprises modulating (preferably, increasing) expression in a plant of a nucleic acid sequence encoding a GRP polypeptide. Reduced nutrient availability may comprise reduced availability of nutrients such as nitrogen, phosphates and other phosphorous-containing compounds, potassium, calcium, cadmium, magnesium, manganese, iron and boron, amongst others.

[0483] The present invention encompasses plants, parts thereof (including seeds), or plant cells obtainable by the methods according to the present invention. The plants, parts thereof, or plant cells comprise a nucleic acid transgene encoding a GRP polypeptide as defined above, preferably of isopentenyl transferase (IPT) polypeptide.

[0484] The invention also provides genetic constructs and vectors to facilitate introduction and/or expression in plants of nucleic acid sequences encoding GRP polypeptides. The gene constructs may be inserted into vectors, which may be commercially available, suitable for transforming into plants and suitable for expression of the gene of interest in the transformed cells. The invention also provides use of a gene construct as defined herein in the methods of the invention.

[0485] More specifically, the present invention provides a construct comprising:
[0486] (i) a nucleic acid sequence encoding a GRP polypeptide as defined above, preferably of isopentenyl transferase (IPT) polypeptide;
[0487] (ii) one or more control sequences capable of driving expression of the nucleic acid sequence of (a); and optionally
[0488] (iii) a transcription termination sequence.

[0489] Preferably, the nucleic acid sequence encoding a GRP polypeptide is as defined above. The term “control sequence” and “termination sequence” are as defined herein.

[0490] Plants are transformed with a vector comprising any of the nucleic acid sequences described above. The skilled artisan is well aware of the genetic elements that must be present on the vector in order to successfully transform, select and propagate host cells containing the sequence of interest. The sequence of interest is operably linked to one or more control sequences (at least to a promoter).

[0491] Advantageously, any type of promoter, whether natural or synthetic, may be used to drive expression of the nucleic acid sequence. A seed-specific promoter is particularly useful in the methods of the invention. See the “Definitions” section herein for definitions of the various promoter types.

[0492] It should be clear that the applicability of the present invention is not restricted to the GRP polypeptide-encoding nucleic acid sequence represented by SEQ ID NO: 131, nor is the applicability of the invention restricted to expression of a GRP polypeptide-encoding nucleic acid sequence when driven by a seed-specific promoter.

[0493] The seed-specific promoter is preferably a prolamin promoter, preferably a prolamin promoter from rice. Further preferably the prolamin promoter is represented by a nucleic acid sequence substantially similar to SEQ ID NO: 133, most preferably the prolamin promoter is as represented by SEQ ID NO: 133. See Table 2 in the “Definitions” section herein for further examples of seed-specific promoters.

[0494] Optionally, one or more terminator sequences may be used in the construct introduced into a plant. Additional regulatory elements may include transcriptional as well as translational enhancers. Those skilled in the art will be aware of terminator and enhancer sequences that may be suitable for use in performing the invention. An intron sequence may also be added to the 5′ untranslated region (UTR) or in the coding sequence to increase the amount of the mature message that accumulates in the cytosol, as described in the definitions section. Other control sequences (besides promoter, enhancer, silencer, intron sequences, 3′UTR and/or 5′UTR regions) may be protein and/or RNA stabilizing elements. Such sequences would be known or may readily be obtained by a person skilled in the art.

[0495] The genetic constructs of the invention may further include an origin of replication sequence that is required for maintenance and/or replication in a specific cell type. One example is when a genetic construct is required to be maintained in a bacterial cell as an episomal genetic element (e.g. plasmid or cosmid molecule). Preferred origins of replication include, but are not limited to, the f1-ori and colE1.

[0496] For the detection of the successful transfer of the nucleic acid sequences as used in the methods of the invention and/or selection of transgenic plants comprising these nucleic acid sequences, it is advantageous to use marker genes (or reporter genes). Therefore, the genetic construct may optionally comprise a selectable marker gene. Selectable markers are described in more detail in the “definitions” section herein. The marker genes may be removed or excised from the transgenic cell once they are no longer needed. Techniques for marker removal are known in the art, useful techniques are described above in the definitions section.

[0497] The invention also provides a method for the production of transgenic plants having enhanced yield-related traits relative to control plants, comprising introduction and expression in a plant of a nucleic acid sequence encoding a GRP polypeptide as defined hereinabove, preferably of isopentenyl transferase (IPT) polypeptide.

[0498] More specifically, the present invention provides a method for the production of transgenic plants having enhanced yield-related traits, which method comprises:
[0499] (i) introducing and expressing in a plant, plant part, or plant cell, a nucleic acid sequence encoding a GRP polypeptide; and
[0500] (ii) cultivating the plant, plant part or plant cell under conditions promoting plant growth and development.

[0501] The nucleic acid sequence of (i) may be any of the nucleic acid sequences capable of encoding a GRP polypeptide as defined herein.

[0502] The nucleic acid sequence may be introduced directly into a plant cell or into the plant itself (including introduction into a tissue, organ or any other part of a plant). According to a preferred feature of the present invention, the nucleic acid sequence is preferably introduced into a plant by transformation. The term “transformation” is described in more detail in the “definitions” section herein.

[0503] The genetically modified plant cells can be regenerated via all methods with which the skilled worker is familiar. Suitable methods can be found in the abovementioned publications by S. D. Kung and R. Wu, Potrykus or Hofgen and Willmitzer.

[0504] Generally after transformation, plant cells or cell groupings are selected for the presence of one or more markers which are encoded by plant-expressible genes co-transferred with the gene of interest, following which the transformed material is regenerated into a whole plant. To select transformed plants, the plant material obtained in the transformation is, as a rule, subjected to selective conditions so that transformed plants can be distinguished from untransformed plants. For example, the seeds obtained in the above-described manner can be planted and, after an initial growing period, subjected to a suitable selection by spraying. A further possibility consists in growing the seeds, if appropriate after sterilization, on agar plates using a suitable selection agent so that only the transformed seeds can grow into plants. Alternatively, the transformed plants are screened for the presence of a selectable marker such as the ones described above.

[0505] Following DNA transfer and regeneration, putatively transformed plants may also be evaluated, for instance using Southern analysis, for the presence of the gene of interest, copy number and/or genomic organisation. Alternatively or additionally, expression levels of the newly introduced DNA may be monitored using Northern and/or Western analysis, both techniques being well known to persons having ordinary skill in the art.

[0506] The generated transformed plants may be propagated by a variety of means, such as by clonal propagation or classical breeding techniques. For example, a first generation (or T1) transformed plant may be selfed and homozygous second-generation (or T2) transformants selected, and the T2 plants may then further be propagated through classical breeding techniques. The generated transformed organisms may take a variety of forms. For example, they may be chimeras of transformed cells and non-transformed cells; clonal transformants (e.g., all cells transformed to contain the expression cassette); grafts of transformed and untransformed tissues (e.g., in plants, a transformed rootstock grafted to an untransformed scion).

[0507] The present invention clearly extends to any plant cell or plant produced by any of the methods described herein, and to all plant parts and propagules thereof. The present invention extends further to encompass the progeny of a primary transformed or transfected cell, tissue, organ or whole plant that has been produced by any of the aforementioned methods, the only requirement being that progeny exhibit the same genotypic and/or phenotypic characteristic(s) as those produced by the parent in the methods according to the invention.

[0508] The invention also includes host cells containing an isolated nucleic acid sequence encoding a GRP polypeptide as defined hereinabove. Preferred host cells according to the invention are plant cells. Host plants for the nucleic acid transgene or the vector used in the method according to the invention, the expression cassette or construct or vector are, in principle, advantageously all plants, which are capable of synthesizing the polypeptides used in the inventive method.

[0509] The methods of the invention are advantageously applicable to any plant. Plants that are particularly useful in the methods of the invention include all plants which belong to the superfamily Viridiplantae, in particular monocotyledonous and dicotyledonous plants including fodder or forage legumes, ornamental plants, food crops, trees or shrubs. According to a preferred embodiment of the present invention, the plant is a crop plant. Examples of crop plants include soybean, sunflower, canola, alfalfa, rapeseed, cotton, tomato, potato and tobacco. Further preferably, the plant is a monocotyledonous plant. Examples of monocotyledonous plants include sugarcane. More preferably the plant is a cereal. Examples of cereals include rice, maize, wheat, barley, millet, rye, triticale, sorghum and oats.

[0510] The invention also extends to harvestable parts of a plant such as, but not limited to seeds, leaves, fruits, flowers, stems, roots, rhizomes, tubers and bulbs. The invention furthermore relates to products derived, preferably directly derived, from a harvestable part of such a plant, such as dry pellets or powders, oil, fat and fatty acids, starch or proteins.

[0511] According to a preferred feature of the invention, the modulated expression is increased expression. Methods for increasing expression of nucleic acid sequences or genes, or gene products, are well documented in the art and examples are provided in the definitions section.

[0512] As mentioned above, a preferred method for modulating (preferably, increasing) expression of a nucleic acid sequence encoding a GRP polypeptide is by introducing and expressing in a plant a nucleic acid sequence encoding a GRP polypeptide; however the effects of performing the method, i.e. enhancing yield-related traits, may also be achieved using other well known techniques, including but not limited to T-DNA activation tagging, TILLING, homologous recombination. A description of these techniques is provided in the definitions section.

[0513] The present invention also encompasses use of nucleic acid sequences encoding GRP polypeptides as described herein and use of these GRP polypeptides in enhancing any of the aforementioned yield-related traits in plants.

[0514] Nucleic acid sequences encoding GRP polypeptide described herein, or the GRP polypeptides themselves, may find use in breeding programmes in which a DNA marker is identified which may be genetically linked to a GRP polypeptide-encoding gene. The genes/nucleic acid sequences, or the GRP polypeptides themselves may be used to define a molecular marker. This DNA or protein marker may then be used in breeding programmes to select plants having enhanced yield-related traits, as defined hereinabove in the methods of the invention.

[0515] Allelic variants of a GRP polypeptide-encoding nucleic acid sequence/gene may also find use in marker-assisted breeding programmes. Such breeding programmes sometimes require introduction of allelic variation by mutagenic treatment of the plants, using for example EMS mutagenesis; alternatively, the programme may start with a collection of allelic variants of so called “natural” origin caused unintentionally. Identification of allelic variants then takes place, for example, by PCR. This is followed by a step for selection of superior allelic variants of the sequence in question and which give enhanced yield-related traits. Selection is typically carried out by monitoring growth performance of plants containing different allelic variants of the sequence in question. Growth performance may be monitored in a greenhouse or in the field. Further optional steps include crossing plants in which the superior allelic variant was identified with another plant. This could be used, for example, to make a combination of interesting phenotypic features.

[0516] Nucleic acid sequences encoding GRP polypeptides may also be used as probes for genetically and physically mapping the genes that they are a part of, and as markers for traits linked to those genes. Such information may be useful in plant breeding in order to develop lines with desired phenotypes. Such use of GRP polypeptide-encoding nucleic acid sequences requires only a nucleic acid sequence of at least 15 nucleotides in length. The GRP polypeptide-encoding nucleic acid sequences may be used as restriction fragment length polymorphism (RFLP) markers. Southern blots (Sambrook J, Fritsch E F and Maniatis T (1989) Molecular Cloning, A Laboratory Manual) of restriction-digested plant genomic DNA may be probed with the GRP-encoding nucleic acid sequences. The resulting banding patterns may then be subjected to genetic analyses using computer programs such as MapMaker (Lander et al. (1987) Genomics 1: 174-181) in order to construct a genetic map. In addition, the nucleic acid sequences may be used to probe Southern blots containing restriction endonuclease-treated genomic DNAs of a set of individuals representing parent and progeny of a defined genetic cross. Segregation of the DNA polymorphisms is noted and used to calculate the position of the GRP polypeptide-encoding nucleic acid sequence in the genetic map previously obtained using this population (Botstein et al. (1980) Am. J. Hum. Genet. 32:314-331).

[0517] The production and use of plant gene-derived probes for use in genetic mapping is described in Bernatzky and Tanksley (1986) Plant Mol. Biol. Reporter 4: 37-41. Numerous publications describe genetic mapping of specific cDNA clones using the methodology outlined above or variations thereof. For example, F2 intercross populations, backcross populations, randomly mated populations, near isogenic lines, and other sets of individuals may be used for mapping. Such methodologies are well known to those skilled in the art.

[0518] The nucleic acid sequence probes may also be used for physical mapping (i.e., placement of sequences on physical maps; see Hoheisel et al. In: Non-mammalian Genomic Analysis: A Practical Guide, Academic press 1996, pp. 319-346, and references cited therein).

[0519] In another embodiment, the nucleic acid sequence probes may be used in direct fluorescence in situ hybridisation (FISH) mapping (Trask (1991) Trends Genet. 7:149-154). Although current methods of FISH mapping favour use of large clones (several kb to several hundred kb; see Laan et al. (1995) Genome Res. 5:13-20), improvements in sensitivity may allow performance of FISH mapping using shorter probes.

[0520] A variety of nucleic acid sequence amplification-based methods for genetic and physical mapping may be carried out using the nucleic acid sequences. Examples include allele-specific amplification (Kazazian (1989) J. Lab. Clin. Med 11:95-96), polymorphism of PCR-amplified fragments (CAPS; Sheffield et al. (1993) Genomics 16:325-332), allele-specific ligation (Landegren et al. (1988) Science 241:1077-1080), nucleotide extension reactions (Sokolov (1990) Nucleic Acids Res. 18:3671), Radiation Hybrid Mapping (Walter et al. (1997) Nat. Genet. 7:22-28) and Happy Mapping (Dear and Cook (1989) Nucleic Acids Res. 17:6795-6807). For these methods, the sequence of a nucleic acid sequence is used to design and produce primer pairs for use in the amplification reaction or in primer extension reactions. The design of such primers is well known to those skilled in the art. In methods employing PCR-based genetic mapping, it may be necessary to identify DNA sequence differences between the parents of the mapping cross in the region corresponding to the instant nucleic acid sequence. This, however, is generally not necessary for mapping methods.

[0521] The methods according to the present invention result in plants having enhanced yield-related traits, as described hereinbefore. These traits may also be combined with other economically advantageous traits, such as further yield-enhancing traits, tolerance to other abiotic and biotic stresses, traits modifying various architectural features and/or biochemical and/or physiological features.

[0522] In one embodiment the invention relates to subject mater summarized as follows:

Item 63: A method for enhancing yield-related traits in plants relative to control plants, comprising modulating expression (preferably, increasing) in a plant of a nucleic acid sequence encoding a GRP polypeptide, wherein said GRP polypeptide is an isopentenyl transferase (IPT) polypeptide as represented by SEQ ID NO: 132 or an orthologue, paralogue, or homologue thereof, and optionally selecting for plants having enhanced yield-related traits.
Item 64: A method according to item 63, wherein said GRP polypeptide as represented by SEQ ID NO: 132 and an orthologue, paralogue, or homologue thereof, belong to the tRNA isopentenyltransferase family with InterPro entries IPR002627 and IPR011593 or comprising a domain or motif according to the consensus sequence as depicted in FIG. 13.
Item 65: Method according to item 63 or 64, wherein said GRP polypeptide has in increasing order of preference at least 50%, 55%, 60%, 65%, 70%, 75%, 80%, 85%, 90%, 95%, 98%, 99% or more amino acid sequence identity to the GRP polypeptide as represented by SEQ ID NO: 132 or to any of the polypeptide sequences given in Table A4 of Example 1.
Item 66: Method according to any preceding item 63 to 65, wherein said nucleic acid sequence encoding a GRP polypeptide is represented by the nucleic acid sequence of SEQ ID NO: 131 or a portion thereof, or a sequence capable of hybridising with the nucleic acid sequence of SEQ ID NO: 131 or a portion thereof or a sequence capable of hybridising with any one of the nucleic acid sequences SEQ ID NOs given in Table A4 of Example 1.
Item 67: Method according to any preceding item 63 to 66 wherein said modulated expression (preferably, increased) is effected by introducing and expressing in a plant a nucleic acid sequence encoding said GRP polypeptide.
Item 68: Method according to any preceding item 63 to 67, wherein said enhanced yield-related traits comprise one or more of: increased total seed yield per plant, increased number of filled seeds, increased total number of seeds, and increased harvest index, relative to control plants.
Item 69: Method according to any preceding item 63 to 68, wherein said modulated expression is increased expression.
Item 70: Method according to any preceding item 63 to 69, wherein said nucleic acid sequence is operably linked to a seed-specific promoter, preferably to a prolamin promoter, most preferably to a prolamin promoter from rice.
Item 71: Method according to any preceding item 63 to 70, wherein said nucleic acid sequence encoding a GRP polypeptide is of plant origin, preferably from a dicotyledonous plant, further preferably from the family Brassicaceae, more preferably from Arabidopsis thaliana.
Item 72: Plant, part thereof (including seeds), or plant cell obtainable by a method according to any preceding item 63 to 71, wherein said plant, part thereof, or plant cell comprises a nucleic acid transgene encoding a GRP polypeptide.

[0523] Item 73: Construct comprising:
[0524] (a) nucleic acid sequence encoding a GRP polypeptide as defined in item 63 to 65;
[0525] (b) one or more control sequences capable of driving expression of the nucleic acid sequence of (a); and optionally
[0526] (c) a transcription termination sequence.
   Item 74: Construct according to item 73, wherein one of said control sequences is a seed-specific promoter, preferably a prolamin promoter, most preferably a prolamin promoter from rice.
   Item 75: Use of a construct according to any of items 73 to 75 in a method for making plants having enhanced yield-related traits, particularly increased total seed yield per plant, increased number of filled seeds, increased total number of seeds, and increased harvest index, relative to control plants.
   Item 76: Plant, plant part or plant cell transformed with a construct according to any of items 74 to 75.
   Item 77: Method for the production of a transgenic plant having enhanced-yield related traits relative to control plants, comprising:
[0527] (i) introducing and expressing in a plant, plant part, or plant cell, a nucleic acid sequence encoding a GRP polypeptide as defined in item 63 to 65; and
[0528] (ii) cultivating the plant, plant part, or plant cell under conditions promoting plant growth and development.
   Item 78: Transgenic plant having enhanced yield-related traits, particularly increased total seed yield per plant, increased number of filled seeds, increased total number of seeds, and increased harvest index, relative to control plants, resulting from increased expression of a nucleic acid sequence encoding a GRP polypeptide as defined in items 63 to 65, or a transgenic plant cell derived from said transgenic plant.
   Item 79: Transgenic plant according to item 72, 76 or 78, or a transgenic plant cell derived thereof, wherein said plant is a crop plant or a monocot or a cereal, such as rice, maize, wheat, barley, millet, rye, triticale, sorghum and oats.
   Item 80: Harvestable parts of a plant comprising a nucleic acid sequence encoding a GRP polypeptide according to item 79, wherein said harvestable parts are preferably seeds.
   Item 81: Products derived from a plant according to item 79 and/or from harvestable parts of a plant according to item 80.
   Item 81: Use of a nucleic acid sequence encoding a GRP polypeptide in enhancing yield-related traits in plants, particularly in increasing total seed yield per plant, increasing number of filled seeds, increasing total number of seeds, and increasing harvest index, relative to control plants.

[0529] In one embodiment of the invention it has now been found that modulating expression in a plant of a nucleic acid encoding an STO polypeptide gives plants having enhanced yield-related traits relative to control plants. According to a first embodiment, the present invention provides a method for enhancing yield-related traits in plants relative to control plants, comprising modulating expression in a plant of a nucleic acid encoding an STO polypeptide.

[0530] A preferred method for modulating (preferably, increasing) expression of a nucleic acid encoding an STO polypeptide is by introducing and expressing in a plant a nucleic acid encoding an STO polypeptide.

[0531] Any reference hereinafter to a “protein useful in the methods of the invention” is taken to mean an STO polypeptide as defined herein. Any reference hereinafter to a “nucleic acid useful in the methods of the invention” is taken to mean a nucleic acid capable of encoding such an STO polypeptide. The nucleic acid to be introduced into a plant (and therefore useful in performing the methods of the invention) is any nucleic acid encoding the type of protein which will now be described, hereinafter also named “STO nucleic acid” or “STO gene”.

[0532] An “STO polypeptide” as defined herein refers to any polypeptide comprising at least one B-box domain. The B-box domain is an amino acid domain conserved in proteins of diverse origin including prokaryotic and eukaryotic organism. B-box domain is about 40 amino acids in length comprising conserved cysteine and/or histidine residues at key positions such that the domain can fall into a tertiary structure similar to the zinc fingers involved in the coordination of zinc ions. NMR analysis reveals that the B-box structure comprises two beta-strands, two helical turns and three extended loop regions different from any other zinc binding motif (Borden et al. 1995 EMBO J. 1995 Dec. 1; 14(23):5947-56).

[0533] Proteins comprising B-box domains can be found in specific databases such as Pfam and Interpro. The accession number of the B-box domain in the release 15.1 of the Interpro database is IPR000315, and PF00643 in Pfam version 21.0.

[0534] Based on sequence comparison of B-box domains found in different proteins it is possible to define consensus sequences representing B-box domains. For example Reymond et al. (EMBO J. 2001 May 1; 20(9):2140-51) were able to define consensus sequences to the two B-box domains present in TRIM proteins of Homo sapiens, as represented by CXX(C/D)X(7-12)CXXCXXXXCXX(C/H)X(3-4)HX(4-9)H for B-box1 and CXXHX(7-9)CXX(C/D/E/H)XXXXCXXCX(3-6)H(X-4)(H/C) for B-box2. A consensus sequence found within the B-box domains of many STO proteins of plant origin is represented by SEQ ID NO: 221 (CX2CX16CX2C). A signature characteristic of all B-box domains is the presence of at least 4 amino acid residues, typically Cysteine and/or Histidine residues with the putative capacity to bind zinc ions.

[0535] Preferred STO polypeptides useful in the methods of the invention comprise at least one, more preferably two B B-box domain having the consensus represented by CX2CX16CX2C (SEQ ID NO: 221).

[0536] The B-box domains found in SEQ ID NO: 169 are represented by SEQ ID NO: 219 and SEQ ID NO: 220. Further preferred STO polypeptides useful in the methods of the invention comprise at least one, more preferably two B-box domains having at least 50%, 55%, 60%, 65%, 70%, 75%, 80%, 85%, 90%, 95% or more sequence identity to SEQ ID NO: 219 or SEQ ID NO: 220.

[0537] Alternatively, a B-box domain in an STO polypeptide may be identified by performing a sequence comparison with known polypeptides comprising a B-box domain and establishing the similarity in the region of the B-box domain. The sequences may be aligned using any of the methods well known in the art such as Blast algorithms. The probability for the alignment to occur with a given sequence is taken as basis for identifying similar polypeptides. A parameter that is typically used to represent such probability is called e-value. The E-value is a measure of the reliability of the S score. The S score is a measure of the similarity of the query to the sequence shown. The e-value describes how often a given S score is expected to occur at random. The e-value cut-off may be as high as 1.0. The typical threshold for a trusted e-value from a BLAST search output using an STO polypeptide as query sequence can is lower than 1.e⁻⁵, 1.e⁻¹⁰, 1.e⁻¹⁵, 1.e⁻²⁰, 1.e⁻²⁵, 1.e⁻⁵⁰, 1.e⁻⁷⁵, 1.e⁻¹⁰⁰, 1.e⁻²⁰⁰, 1.e⁻³⁰⁰, 1.e⁻⁴⁰⁰, 1.e⁻⁵⁰⁰, 1.e⁻⁶⁰⁰, 1.e⁻⁷⁰⁰ and 1.e⁻⁸⁰⁰. Preferred STO polypeptides useful in the methods of the invention comprise at least one, more preferably two B-box domains having a sequence having in increasing order of preference an e-value lower than e⁻⁵(=10⁻⁵), 1.e⁻¹⁰, 1.e⁻¹⁵, 1.e⁻²⁰, 1.e⁻²⁵, 1.e⁻⁵⁰, 1.e⁻⁷⁵, 1.e⁻¹⁰⁰, 1.e⁻²⁰⁰, 1.e⁻³⁰⁰, 1.e⁻⁴⁰⁰, 1.e⁻⁵⁰⁰, 1.e⁻⁶⁰⁰, 1.e⁻⁷⁰⁰ and 1.e⁻⁸⁰⁰ in an alignment with SEQ ID NO: 219 or SEQ ID NO: 220 or any B-box domain as found in a known STO polypeptide, such as those listed in Table A.

[0538] Preferably, the STO polypeptide sequence useful in the methods of the invention when used in the construction of a phylogenetic tree, such as the one depicted in FIG. 16, clusters with the group of STO polypeptides comprising the amino acid sequence represented by SEQ ID NO: 169 (OS04g0540200 in the Figure) rather than with any other group.

[0539] Alternatively or additionally, a “STO polypeptide” as defined herein refers to any polypeptide having in increasing order of preference at least 50%, 55%, 60%, 65%, 70%, 75%, 80%, 85%, 90%, 95%, 98%, 99% or more polypeptide sequence identity to the STO polypeptide as represented by SEQ ID NO: 169, or by SEQ ID NO: 171, or to any of the polypeptide sequences given in Table A5 of Example 1 herein.

[0540] The term “domain” and “motif” is defined in the “definitions” section herein. Specialist databases exist for the identification of domains, for example, SMART (Schultz et al. (1998) Proc. Natl. Acad. Sci. USA 95, 5857-5864; Letunic et al. (2002) Nucleic Acids Res 30, 242-244), InterPro (Mulder et al., (2003) Nucl. Acids. Res. 31, 315-318), Prosite (Bucher and Bairoch (1994), A generalized profile syntax for biomolecular sequences motifs and its function in automatic sequence interpretation. (In) ISMB-94; Proceedings 2nd International Conference on Intelligent Systems for Molecular Biology. Altman R., Brutlag D., Karp P., Lathrop R., Searls D., Eds., pp 53-61, AAAI Press, Menlo Park; Hulo et al., Nucl. Acids. Res. 32:D134-D137, (2004) ), or Pfam (Bateman et al., Nucleic Acids Research 30(1): 276-280 (2002)). A set of tools for in silico analysis of protein sequences is available on the ExPASy proteomics server (Swiss Institute of Bioinformatics (Gasteiger et al., ExPASy: the proteomics server for in-depth protein knowledge and analysis, Nucleic Acids Res. 31:3784-3788 (2003)). Domains or motifs may also be identified using routine techniques, such as by sequence alignment.

[0541] Methods for the alignment of sequences for comparison are well known in the art, such methods include GAP, BESTFIT, BLAST, FASTA and TFASTA. GAP uses the algorithm of Needleman and Wunsch ((1970) J Mol Biol 48: 443-453) to find the global (i.e. spanning the complete sequences) alignment of two sequences that maximizes the number of matches and minimizes the number of gaps. The BLAST algorithm (Altschul et al. (1990) J Mol Biol 215: 403-10) calculates percent sequence identity and performs a statistical analysis of the similarity between the two sequences. The software for performing BLAST analysis is publicly available through the National Centre for Biotechnology Information (NCBI). Homologues may readily be identified using, for example, the ClustalW multiple sequence alignment algorithm (version 1.83), with the default pairwise alignment parameters, and a scoring method in percentage. Global percentages of similarity and identity may also be determined using one of the methods available in the MatGAT software package (Campanella et al., BMC Bioinformatics. 2003 Jul. 10; 4:29. MatGAT: an application that generates similarity/identity matrices using protein or DNA sequences.). Minor manual editing may be performed to optimise alignment between conserved motifs, as would be apparent to a person skilled in the art. Furthermore, instead of using full-length sequences for the identification of homologues, specific domains may also be used. The sequence identity values may be determined over the entire nucleic acid or amino acid sequence or over selected domains or conserved motif(s), using the programs mentioned above using the default parameters.

[0542] Furthermore, STO polypeptides (at least in their native form) typically when expressed in a transgenic plant, preferably rice, under the control of a constitutive promoter result in modulation of flowering time, typically in shortening flowering time. Tools and techniques for producing transgenic plants and measuring flowering time are well known in the art. Further details are provided in the Examples section.

[0543] The present invention is illustrated by transforming plants with the nucleic acid sequence represented by SEQ ID NO: 168, encoding the polypeptide sequence of SEQ ID NO: 169. However, performance of the invention is not restricted to these sequences; the methods of the invention may advantageously be performed using any STO-encoding nucleic acid or STO polypeptide as defined herein.

[0544] Examples of nucleic acids encoding STO polypeptides are given in Table A5 of Example 1 herein. Such nucleic acids are useful in performing the methods of the invention. The amino acid sequences given in Table A5 of Example 1 are example sequences of orthologues and paralogues of the STO polypeptide represented by SEQ ID NO: 169, the terms “orthologues” and “paralogues” being as defined herein. Further orthologues and paralogues may readily be identified by performing a so-called reciprocal blast search. Typically, this involves a first BLAST involving BLASTing a query sequence (for example using any of the sequences listed in Table A5 of Example 1) against any sequence database, such as the publicly available NCBI database. BLASTN or TBLASTX (using standard default values) are generally used when starting from a nucleotide sequence, and BLASTP or TBLASTN (using standard default values) when starting from a protein sequence. The BLAST results may optionally be filtered. The full-length sequences of either the filtered results or non-filtered results are then BLASTed back (second BLAST) against sequences from the organism from which the query sequence is derived (where the query sequence is SEQ ID NO: 168 or SEQ ID NO: 169, the second BLAST would therefore be against rice sequences). The results of the first and second BLASTs are then compared. A paralogue is identified if a high-ranking hit from the first blast is from the same species as from which the query sequence is derived, a BLAST back then ideally results in the query sequence amongst the highest hits; an orthologue is identified if a high-ranking hit in the first BLAST is not from the same species as from which the query sequence is derived, and preferably results upon BLAST back in the query sequence being among the highest hits.

### Preferred Homologs

[0545] High-ranking hits are those having a low E-value. The lower the E-value, the more significant the score (or in other words the lower the chance that the hit was found by chance). Computation of the E-value is well known in the art. In addition to E-values, comparisons are also scored by percentage identity. Percentage identity refers to the number of identical nucleotides (or amino acids) between the two compared nucleic acid (or polypeptide) sequences over a particular length. In the case of large families, ClustalW may be used, followed by a neighbour joining tree, to help visualize clustering of related genes and to identify orthologues and paralogues.

[0546] Nucleic acid variants may also be useful in practising the methods of the invention. Examples of such variants include nucleic acids encoding homologues and derivatives of any one of the amino acid sequences given in Table A5 of Example 1, the terms “homologue” and “derivative” being as defined herein. Also useful in the methods of the invention are nucleic acids encoding homologues and derivatives of orthologues or paralogues of any one of the amino acid sequences given in Table A5 of Example 1. Homologues and derivatives useful in the methods of the present invention have substantially the same biological and functional activity as the unmodified protein from which they are derived.

[0547] Further nucleic acid variants useful in practising the methods of the invention include portions of nucleic acids encoding STO polypeptides, nucleic acids hybridising to nucleic acids encoding STO polypeptides, splice variants of nucleic acids encoding STO polypeptides, allelic variants of nucleic acids encoding STO polypeptides and variants of nucleic acids encoding STO polypeptides obtained by gene shuffling. The terms hybridising sequence, splice variant, allelic variant and gene shuffling are as described herein.

[0548] Nucleic acids encoding STO polypeptides need not be full-length nucleic acids, since performance of the methods of the invention does not rely on the use of full-length nucleic acid sequences. According to the present invention, there is provided a method for enhancing yield-related traits in plants, comprising introducing and expressing in a plant a portion of any one of the nucleic acid sequences given in Table A5 of Example 1, or a portion of a nucleic acid encoding an orthologue, paralogue or homologue of any of the amino acid sequences given in Table A5 of Example 1.

[0549] A portion of a nucleic acid may be prepared, for example, by making one or more deletions to the nucleic acid. The portions may be used in isolated form or they may be fused to other coding (or non-coding) sequences in order to, for example, produce a protein that combines several activities. When fused to other coding sequences, the resultant polypeptide produced upon translation may be bigger than that predicted for the protein portion.

[0550] Portions useful in the methods of the invention, encode an STO polypeptide as defined herein, and have substantially the same biological activity as the amino acid sequences given in Table A5 of Example 1. Preferably, the portion is a portion of any one of the nucleic acids given in Table A of Example 1, or is a portion of a nucleic acid encoding an orthologue or paralogue of any one of the amino acid sequences given in Table A5 of Example 1. Preferably the portion is at least 100, 200, 300, 400, 500, 550, 600, 650, 700, 750, 800, 850, 900, 950, 1000 consecutive nucleotides in length, the consecutive nucleotides being of any one of the nucleic acid sequences given in Table A5 of Example 1, or of a nucleic acid encoding an orthologue or paralogue of any one of the amino acid sequences given in Table A5 of Example 1. Most preferably the portion is a portion of the nucleic acid of SEQ ID NO: 168. Preferably, the portion encodes an amino acid sequence which, when used in the construction of a phylogenetic tree, such as the one depicted in FIG. 16, Preferably, the STO polypeptide sequence useful in the methods of the invention when used in the construction of a phylogenetic tree, such as the one depicted in FIG. 16, clusters with the group of STO polypeptides comprising the amino acid sequence represented by SEQ ID NO: 169 (OS04g0540200 in the Figure) rather than with any other group.

[0551] Another nucleic acid variant useful in the methods of the invention is a nucleic acid capable of hybridising, under reduced stringency conditions, preferably under stringent conditions, with a nucleic acid encoding an STO polypeptide as defined herein, or with a portion as defined herein.

[0552] According to the present invention, there is provided a method for enhancing yield-related traits in plants, comprising introducing and expressing in a plant a nucleic acid capable of hybridizing to any one of the nucleic acids given in Table A5 of Example 1, or comprising introducing and expressing in a plant a nucleic acid capable of hybridising to a nucleic acid encoding an orthologue, paralogue or homologue of any of the nucleic acid sequences given in Table A5 of Example 1.

[0553] Hybridising sequences useful in the methods of the invention encode an STO polypeptide as defined herein, having substantially the same biological activity as the amino acid sequences given in Table A5 of Example 1. Preferably, the hybridising sequence is capable of hybridising to any one of the nucleic acids given in Table A5 of Example 1, or to a portion of any of these sequences, a portion being as defined above, or the hybridising sequence is capable of hybridising to a nucleic acid encoding an orthologue or paralogue of any one of the amino acid sequences given in Table A5 of Example 1. Most preferably, the hybridising sequence is capable of hybridising to a nucleic acid as represented by SEQ ID NO: 168 or to a portion thereof.

[0554] Preferably, the hybridising sequence encodes a polypeptide with an amino acid sequence which, when full-length and used in the construction of a phylogenetic tree, such as the one depicted in FIG. 16, clusters with the group of STO polypeptides comprising the amino acid sequence represented by SEQ ID NO: 169 (OS04g0540200 in the Figure) rather than with any other group.

[0555] Another nucleic acid variant useful in the methods of the invention is a splice variant encoding an STO polypeptide as defined hereinabove, a splice variant being as defined herein.

[0556] According to the present invention, there is provided a method for enhancing yield-related traits in plants, comprising introducing and expressing in a plant a splice variant of any one of the nucleic acid sequences given in Table A5 of Example 1, or a splice variant of a nucleic acid encoding an orthologue, paralogue or homologue of any of the amino acid sequences given in Table A5 of Example 1.

[0557] Preferred splice variants are splice variants of a nucleic acid represented by SEQ ID NO: 168, or a splice variant of a nucleic acid encoding an orthologue or paralogue of SEQ ID NO: 169. Preferably, the amino acid sequence encoded by the splice variant, when used in the construction of a phylogenetic tree, such as the one depicted in FIG. 16, clusters with the group of STO polypeptides comprising the amino acid sequence represented by SEQ ID NO: 169 (OS04g0540200 in the Figure) rather than with any other group.

[0558] Another nucleic acid variant useful in performing the methods of the invention is an allelic variant of a nucleic acid encoding an STO polypeptide as defined hereinabove, an allelic variant being as defined herein.

[0559] According to the present invention, there is provided a method for enhancing yield-related traits in plants, comprising introducing and expressing in a plant an allelic variant of any one of the nucleic acids given in Table A5 of Example 1, or comprising introducing and expressing in a plant an allelic variant of a nucleic acid encoding an orthologue, paralogue or homologue of any of the amino acid sequences given in Table A5 of Example 1.

[0560] The allelic variants useful in the methods of the present invention have substantially the same biological activity as the STO polypeptide of SEQ ID NO: 169 and any of the amino acids depicted in Table A of Example 1. Allelic variants exist in nature, and encompassed within the methods of the present invention is the use of these natural alleles. Preferably, the allelic variant is an allelic variant of SEQ ID NO: 168 or an allelic variant of a nucleic acid encoding an orthologue or paralogue of SEQ ID NO: 169. Preferably, the amino acid sequence encoded by the allelic variant, when used in the construction of a phylogenetic tree, such as the one depicted in FIG. 16, clusters with the group of STO polypeptides comprising the amino acid sequence represented by SEQ ID NO: 169 (OS04g0540200 in the Figure) rather than with any other group.

[0561] Gene shuffling or directed evolution may also be used to generate variants of nucleic acids encoding STO polypeptides as defined above; the term “gene shuffling” being as defined herein.

[0562] According to the present invention, there is provided a method for enhancing yield-related traits in plants, comprising introducing and expressing in a plant a variant of any one of the nucleic acid sequences given in Table A5 of Example 1, or comprising introducing and expressing in a plant a variant of a nucleic acid encoding an orthologue, paralogue or homologue of any of the amino acid sequences given in Table A5 of Example 1, which variant nucleic acid is obtained by gene shuffling.

[0563] Preferably, the amino acid sequence encoded by the variant nucleic acid directly or indirectly obtained by gene shuffling, when used in the construction of a phylogenetic tree such as the one depicted in FIG. 16, clusters with the group of STO polypeptides comprising the amino acid sequence represented by SEQ ID NO: 169 (OS04g0540200 in the Figure) rather than with any other group.

[0564] Furthermore, nucleic acid variants may also be obtained by site-directed mutagenesis. Several methods are available to achieve site-directed mutagenesis, the most common being PCR based methods (Current Protocols in Molecular Biology. Wiley Eds.).

[0565] Nucleic acids encoding STO polypeptides may be derived from any natural or artificial source. The nucleic acid may be modified from its native form in composition and/or genomic environment through deliberate human manipulation. Preferably the STO polypeptide-encoding nucleic acid is from a plant, further preferably from a monocotyledonous plant, more preferably from the family Poaceae, most preferably the nucleic acid is from Oryza sativa.

[0566] Performance of the methods of the invention gives plants having enhanced yield-related traits. In particular performance of the methods of the invention gives plants having increased yield, especially increased seed yield relative to control plants. The terms “yield” and “seed yield” are described in more detail in the “definitions” section herein.

[0567] Reference herein to enhanced yield-related traits is taken to mean an increase in early (seedling) vigour and altered flowering time more particular shorter of flowering time relative to control plants. Preferably the shortening of the flowering time is at least of 1, 2, 3, 4, 5, 6, 7, 8, 9, 10, 11, 12, 13, 14, 15, 16, 17, 18, 19, 20, 21, 22, 23, 24 or 25 days or at least by 5%, 10%, 15%, 20%, or 25% of the time compared to relative to control plants

[0568] Taking corn as an example, a yield increase may be manifested as one or more of the following: increase in the number of plants established per hectare or acre, an increase in the number of ears per plant, an increase in the number of rows, number of kernels per row, kernel weight, thousand kernel weight, ear length/diameter, increase in the seed filling rate (which is the number of filled seeds divided by the total number of seeds and multiplied by 100), among others. Taking rice as an example, a yield increase may manifest itself as an increase in one or more of the following: number of plants per hectare or acre, number of panicles per plant, number of spikelets per panicle, number of flowers (florets) per panicle (which is expressed as a ratio of the number of filled seeds over the number of primary panicles), increase in the seed filling rate (which is the number of filled seeds divided by the total number of seeds and multiplied by 100), increase in thousand kernel weight, among others.

[0569] The present invention provides a method for increasing early (seedling) vigour and altering flowering time, particularly shortening of flowering time of plants, relative to control plants which method comprises modulating expression, preferably increasing expression, in a plant of a nucleic acid encoding an STO polypeptide as defined herein.

[0570] Since the transgenic plants according to the present invention have increased yield, it is likely that these plants exhibit an increased growth rate (during at least part of their life cycle), relative to the growth rate of control plants at a corresponding stage in their life cycle.

[0571] The increased growth rate may be specific to one or more parts of a plant (including seeds), or may be throughout substantially the whole plant. Plants having an increased growth rate may have a shorter life cycle. The life cycle of a plant may be taken to mean the time needed to grow from a dry mature seed up to the stage where the plant has produced dry mature seeds, similar to the starting material. This life cycle may be influenced by factors such as early vigour, growth rate, greenness index, flowering time and speed of seed maturation. The increase in growth rate may take place at one or more stages in the life cycle of a plant or during substantially the whole plant life cycle. Increased growth rate during the early stages in the life cycle of a plant may reflect enhanced or increased vigour. The increase in growth rate may alter the harvest cycle of a plant allowing plants to be sown later and/or harvested sooner than would otherwise be possible (a similar effect may be obtained with earlier flowering time). If the growth rate is sufficiently increased, it may allow for the further sowing of seeds of the same plant species (for example sowing and harvesting of rice plants followed by sowing and harvesting of further rice plants all within one conventional growing period). Similarly, if the growth rate is sufficiently increased, it may allow for the further sowing of seeds of different plants species (for example the sowing and harvesting of corn plants followed by, for example, the sowing and optional harvesting of soybean, potato or any other suitable plant). Harvesting additional times from the same rootstock in the case of some crop plants may also be possible. Altering the harvest cycle of a plant may lead to an increase in annual biomass production per acre (due to an increase in the number of times (say in a year) that any particular plant may be grown and harvested). An increase in growth rate may also allow for the cultivation of transgenic plants in a wider geographical area than their wild-type counterparts, since the territorial limitations for growing a crop are often determined by adverse environmental conditions either at the time of planting (early season) or at the time of harvesting (late season). Such adverse conditions may be avoided if the harvest cycle is shortened. The growth rate may be determined by deriving various parameters from growth curves, such parameters may be: T-Mid (the time taken for plants to reach 50% of their maximal size) and T-90 (time taken for plants to reach 90% of their maximal size), amongst others.

[0572] According to a preferred feature of the present invention, performance of the methods of the invention gives plants having an increased growth rate relative to control plants. Therefore, according to the present invention, there is provided a method for increasing the growth rate of plants, which method comprises modulating expression, preferably increasing expression, in a plant of a nucleic acid encoding an STO polypeptide as defined herein.

[0573] An increase in yield and/or growth rate occurs whether the plant is under non-stress conditions or whether the plant is exposed to various stresses compared to control plants. Plants typically respond to exposure to stress by growing more slowly. In conditions of severe stress, the plant may even stop growing altogether. Mild stress on the other hand is defined herein as being any stress to which a plant is exposed which does not result in the plant ceasing to grow altogether without the capacity to resume growth. Mild stress in the sense of the invention leads to a reduction in the growth of the stressed plants of less than 40%, 35% or 30%, preferably less than 25%, 20% or 15%, more preferably less than 14%, 13%, 12%, 11% or 10% or less in comparison to the control plant under non-stress conditions. Due to advances in agricultural practices (irrigation, fertilization, pesticide treatments) severe stresses are not often encountered in cultivated crop plants. As a consequence, the compromised growth induced by mild stress is often an undesirable feature for agriculture. Mild stresses are the everyday biotic and/or abiotic (environmental) stresses to which a plant is exposed. Abiotic stresses may be due to drought or excess water, anaerobic stress, salt stress, chemical toxicity, oxidative stress and hot, cold or freezing temperatures. The abiotic stress may be an osmotic stress caused by a water stress (particularly due to drought), salt stress, oxidative stress or an ionic stress. Biotic stresses are typically those stresses caused by pathogens, such as bacteria, viruses, fungi and insects.

[0574] In particular, the methods of the present invention may be performed under non-stress conditions or under conditions of mild drought to give plants having increased yield relative to control plants. As reported in Wang et al. (Planta (2003) 218: 1-14), abiotic stress leads to a series of morphological, physiological, biochemical and molecular changes that adversely affect plant growth and productivity. Drought, salinity, extreme temperatures and oxidative stress are known to be interconnected and may induce growth and cellular damage through similar mechanisms. Rabbani et al. (Plant Physiol (2003) 133: 1755-1767) describes a particularly high degree of “cross talk” between drought stress and high-salinity stress. For example, drought and/or salinisation are manifested primarily as osmotic stress, resulting in the disruption of homeostasis and ion distribution in the cell. Oxidative stress, which frequently accompanies high or low temperature, salinity or drought stress, may cause denaturing of functional and structural proteins. As a consequence, these diverse environmental stresses often activate similar cell signalling pathways and cellular responses, such as the production of stress proteins, up-regulation of anti-oxidants, accumulation of compatible solutes and growth arrest. The term “non-stress” conditions as used herein are those environmental conditions that allow optimal growth of plants. Persons skilled in the art are aware of normal soil conditions and climatic conditions for a given location.

[0575] Performance of the methods of the invention gives plants grown under non-stress conditions or under mild drought conditions increased yield relative to control plants grown under comparable conditions. Therefore, according to the present invention, there is provided a method for increasing yield in plants grown under non-stress conditions or under mild drought conditions, which method comprises increasing expression in a plant of a nucleic acid encoding an STO polypeptide.

[0576] Performance of the methods of the invention gives plants grown under conditions of nutrient deficiency, particularly under conditions of nitrogen deficiency, increased yield relative to control plants grown under comparable conditions. Therefore, according to the present invention, there is provided a method for increasing yield in plants grown under conditions of nutrient deficiency, which method comprises increasing expression in a plant of a nucleic acid encoding an STO polypeptide. Nutrient deficiency may result from a lack of nutrients such as nitrogen, phosphates and other phosphorous-containing compounds, potassium, calcium, cadmium, magnesium, manganese, iron and boron, amongst others.

[0577] The present invention encompasses plants or parts thereof (including seeds) obtainable by the methods according to the present invention. The plants or parts thereof comprise a nucleic acid transgene encoding an STO polypeptide as defined above.

[0578] The invention also provides genetic constructs and vectors to facilitate introduction and/or expression in plants of nucleic acids encoding STO polypeptides. The gene constructs may be inserted into vectors, which may be commercially available, suitable for transforming into plants and suitable for expression of the gene of interest in the transformed cells. The invention also provides use of a gene construct as defined herein in the methods of the invention.

[0579] More specifically, the present invention provides a construct comprising:
[0580] (a) a nucleic acid encoding an STO polypeptide as defined above;
[0581] (b) one or more control sequences capable of driving expression of the nucleic acid sequence of (a); and optionally
[0582] (c) a transcription termination sequence.

[0583] Preferably, the nucleic acid encoding an STO polypeptide is as defined above. The term “control sequence” and “termination sequence” are as defined herein.

[0584] Plants are transformed with a vector comprising any of the nucleic acids described above. The skilled artisan is well aware of the genetic elements that must be present on the vector in order to successfully transform, select and propagate host cells containing the sequence of interest. The sequence of interest is operably linked to one or more control sequences (at least to a promoter).

[0585] Advantageously, any type of promoter, whether natural or synthetic, may be used to drive expression of the nucleic acid sequence. A constitutive promoter is particularly useful in the methods. See the “Definitions” section herein for definitions of the various promoter types.

[0586] It should be clear that the applicability of the present invention is not restricted to the STO polypeptide-encoding nucleic acid represented by SEQ ID NO: 168, nor is the applicability of the invention restricted to expression of an STO polypeptide-encoding nucleic acid when driven by a constitutive promoter.

[0587] The constitutive promoter is preferably a GOS2 promoter, preferably a GOS2 promoter from rice. Further preferably the constitutive promoter is represented by a nucleic acid sequence substantially similar to SEQ ID NO: 218, most preferably the constitutive promoter is as represented by SEQ ID NO: 218. See Table 2 in the “Definitions” section herein for further examples of constitutive promoters.

[0588] Optionally, one or more terminator sequences may be used in the construct introduced into a plant. Additional regulatory elements may include transcriptional as well as translational enhancers. Those skilled in the art will be aware of terminator and enhancer sequences that may be suitable for use in performing the invention. An intron sequence may also be added to the 5′ untranslated region (UTR) or in the coding sequence to increase the amount of the mature message that accumulates in the cytosol, as described in the definitions section. Other control sequences (besides promoter, enhancer, silencer, intron sequences, 3′UTR and/or 5′UTR regions) may be protein and/or RNA stabilizing elements. Such sequences would be known or may readily be obtained by a person skilled in the art.

[0589] The genetic constructs of the invention may further include an origin of replication sequence that is required for maintenance and/or replication in a specific cell type. One example is when a genetic construct is required to be maintained in a bacterial cell as an episomal genetic element (e.g. plasmid or cosmid molecule). Preferred origins of replication include, but are not limited to, the f1-ori and colE1.

[0590] For the detection of the successful transfer of the nucleic acid sequences as used in the methods of the invention and/or selection of transgenic plants comprising these nucleic acids, it is advantageous to use marker genes (or reporter genes). Therefore, the genetic construct may optionally comprise a selectable marker gene. Selectable markers are described in more detail in the “definitions” section herein. The marker genes may be removed or excised from the transgenic cell once they are no longer needed. Techniques for marker removal are known in the art, useful techniques are described above in the definitions section.

[0591] The invention also provides a method for the production of transgenic plants having enhanced yield-related traits relative to control plants, comprising introduction and expression in a plant of any nucleic acid encoding an STO polypeptide as defined hereinabove.

[0592] More specifically, the present invention provides a method for the production of transgenic plants having increased enhanced yield-related traits, particularly increased (early) seedling vigour and/or altered flowering time more particular shorter flowering time of plants, which method comprises:

(i) introducing and expressing in a plant or plant cell an STO polypeptide-encoding nucleic acid; and
(ii) cultivating the plant cell under conditions promoting plant growth and development.

[0593] The nucleic acid of (i) may be any of the nucleic acids capable of encoding an STO polypeptide as defined herein.

[0594] The nucleic acid may be introduced directly into a plant cell or into the plant itself (including introduction into a tissue, organ or any other part of a plant). According to a preferred feature of the present invention, the nucleic acid is preferably introduced into a plant by transformation. The term “transformation” is described in more detail in the “definitions” section herein.

[0595] The genetically modified plant cells can be regenerated via all methods with which the skilled worker is familiar. Suitable methods can be found in the abovementioned publications by S. D. Kung and R. Wu, Potrykus or Hofgen and Willmitzer.

[0596] Generally after transformation, plant cells or cell groupings are selected for the presence of one or more markers which are encoded by plant-expressible genes co-transferred with the gene of interest, following which the transformed material is regenerated into a whole plant. To select transformed plants, the plant material obtained in the transformation is, as a rule, subjected to selective conditions so that transformed plants can be distinguished from untransformed plants. For example, the seeds obtained in the above-described manner can be planted and, after an initial growing period, subjected to a suitable selection by spraying. A further possibility consists in growing the seeds, if appropriate after sterilization, on agar plates using a suitable selection agent so that only the transformed seeds can grow into plants. Alternatively, the transformed plants are screened for the presence of a selectable marker such as the ones described above.

[0597] Following DNA transfer and regeneration, putatively transformed plants may also be evaluated, for instance using Southern analysis, for the presence of the gene of interest, copy number and/or genomic organisation. Alternatively or additionally, expression levels of the newly introduced DNA may be monitored using Northern and/or Western analysis, both techniques being well known to persons having ordinary skill in the art.

[0598] The generated transformed plants may be propagated by a variety of means, such as by clonal propagation or classical breeding techniques. For example, a first generation (or T1) transformed plant may be selfed and homozygous second-generation (or T2) transformants selected, and the T2 plants may then further be propagated through classical breeding techniques. The generated transformed organisms may take a variety of forms. For example, they may be chimeras of transformed cells and non-transformed cells; clonal transformants (e.g., all cells transformed to contain the expression cassette); grafts of transformed and untransformed tissues (e.g., in plants, a transformed rootstock grafted to an untransformed scion).

[0599] The present invention clearly extends to any plant cell or plant produced by any of the methods described herein, and to all plant parts and propagules thereof. The present invention extends further to encompass the progeny of a primary transformed or transfected cell, tissue, organ or whole plant that has been produced by any of the aforementioned methods, the only requirement being that progeny exhibit the same genotypic and/or phenotypic characteristic(s) as those produced by the parent in the methods according to the invention.

[0600] The invention also includes host cells containing an isolated nucleic acid encoding an STO polypeptide as defined hereinabove. Preferred host cells according to the invention are plant cells. Host plants for the nucleic acids or the vector used in the method according to the invention, the expression cassette or construct or vector are, in principle, advantageously all plants, which are capable of synthesizing the polypeptides used in the inventive method.

[0601] The methods of the invention are advantageously applicable to any plant. Plants that are particularly useful in the methods of the invention include all plants which belong to the superfamily Viridiplantae, in particular monocotyledonous and dicotyledonous plants including fodder or forage legumes, ornamental plants, food crops, trees or shrubs. According to a preferred embodiment of the present invention, the plant is a crop plant. Examples of crop plants include soybean, sunflower, canola, alfalfa, rapeseed, cotton, tomato, potato and tobacco. Further preferably, the plant is a monocotyledonous plant. Examples of monocotyledonous plants include sugarcane. More preferably the plant is a cereal. Examples of cereals include rice, maize, wheat, barley, millet, rye, triticale, sorghum and oats.

[0602] The invention also extends to harvestable parts of a plant such as, but not limited to seeds, leaves, fruits, flowers, stems, roots, rhizomes, tubers and bulbs. The invention furthermore relates to products derived, preferably directly derived, from a harvestable part of such a plant, such as dry pellets or powders, oil, fat and fatty acids, starch or proteins.

[0603] According to a preferred feature of the invention, the modulated expression is increased expression. Methods for increasing expression of nucleic acids or genes, or gene products, are well documented in the art and examples are provided in the definitions section.

[0604] As mentioned above, a preferred method for modulating (preferably, increasing) expression of a nucleic acid encoding an STO polypeptide is by introducing and expressing in a plant a nucleic acid encoding an STO polypeptide; however the effects of performing the method, i.e. enhancing yield-related traits may also be achieved using other well known techniques, including, but not limited to, T-DNA activation tagging, TILLING, homologous recombination. A description of these techniques is provided in the definitions section.

[0605] The present invention also encompasses use of nucleic acids encoding STO polypeptides as described herein and use of these STO polypeptides in enhancing any of the aforementioned yield-related traits in plants.

[0606] Nucleic acids encoding STO polypeptide described herein, or the STO polypeptides themselves, may find use in breeding programmes in which a DNA marker is identified, which may be genetically linked to an STO polypeptide-encoding gene. The nucleic acids/genes, or the STO polypeptides themselves may be used to define a molecular marker. This DNA or protein marker may then be used in breeding programmes to select plants having enhanced yield-related traits as defined hereinabove in the methods of the invention.

[0607] Allelic variants of an STO polypeptide-encoding nucleic acid/gene may also find use in marker-assisted breeding programmes. Such breeding programmes sometimes require introduction of allelic variation by mutagenic treatment of the plants, using for example EMS mutagenesis; alternatively, the programme may start with a collection of allelic variants of so called “natural” origin caused unintentionally. Identification of allelic variants then takes place, for example, by PCR. This is followed by a step for selection of superior allelic variants of the sequence in question and which give increased yield. Selection is typically carried out by monitoring growth performance of plants containing different allelic variants of the sequence in question. Growth performance may be monitored in a greenhouse or in the field. Further optional steps include crossing plants in which the superior allelic variant was identified with another plant. This could be used, for example, to make a combination of interesting phenotypic features.

[0608] Nucleic acids encoding STO polypeptides may also be used as probes for genetically and physically mapping the genes that they are a part of, and as markers for traits linked to those genes. Such information may be useful in plant breeding in order to develop lines with desired phenotypes. Such use of STO polypeptide-encoding nucleic acids requires only a nucleic acid sequence of at least 15 nucleotides in length. The STO polypeptide-encoding nucleic acids may be used as restriction fragment length polymorphism (RFLP) markers. Southern blots (Sambrook J, Fritsch E F and Maniatis T (1989) Molecular Cloning, A Laboratory Manual) of restriction-digested plant genomic DNA may be probed with the STO-encoding nucleic acids. The resulting banding patterns may then be subjected to genetic analyses using computer programs such as MapMaker (Lander et al. (1987) Genomics 1: 174-181) in order to construct a genetic map. In addition, the nucleic acids may be used to probe Southern blots containing restriction endonuclease-treated genomic DNAs of a set of individuals representing parent and progeny of a defined genetic cross. Segregation of the DNA polymorphisms is noted and used to calculate the position of the STO polypeptide-encoding nucleic acid in the genetic map previously obtained using this population (Botstein et al. (1980) Am. J. Hum. Genet. 32:314-331).

[0609] The production and use of plant gene-derived probes for use in genetic mapping is described in Bernatzky and Tanksley (1986) Plant Mol. Biol. Reporter 4: 37-41. Numerous publications describe genetic mapping of specific cDNA clones using the methodology outlined above or variations thereof. For example, F2 intercross populations, backcross populations, randomly mated populations, near isogenic lines, and other sets of individuals may be used for mapping. Such methodologies are well known to those skilled in the art.

[0610] The nucleic acid probes may also be used for physical mapping (i.e., placement of sequences on physical maps; see Hoheisel et al. In: Non-mammalian Genomic Analysis: A Practical Guide, Academic press 1996, pp. 319-346, and references cited therein).

[0611] In another embodiment, the nucleic acid probes may be used in direct fluorescence in situ hybridisation (FISH) mapping (Trask (1991) Trends Genet. 7:149-154). Although current methods of FISH mapping favour use of large clones (several kb to several hundred kb; see Laan et al. (1995) Genome Res. 5:13-20), improvements in sensitivity may allow performance of FISH mapping using shorter probes.

[0612] A variety of nucleic acid amplification-based methods for genetic and physical mapping may be carried out using the nucleic acids. Examples include allele-specific amplification (Kazazian (1989) J. Lab. Clin. Med 11:95-96), polymorphism of PCR-amplified fragments (CAPS; Sheffield et al. (1993) Genomics 16:325-332), allele-specific ligation (Landegren et al. (1988) Science 241:1077-1080), nucleotide extension reactions (Sokolov (1990) Nucleic Acid Res. 18:3671), Radiation Hybrid Mapping (Walter et al. (1997) Nat. Genet. 7:22-28) and Happy Mapping (Dear and Cook (1989) Nucleic Acid Res. 17:6795-6807). For these methods, the sequence of a nucleic acid is used to design and produce primer pairs for use in the amplification reaction or in primer extension reactions. The design of such primers is well known to those skilled in the art. In methods employing PCR-based genetic mapping, it may be necessary to identify DNA sequence differences between the parents of the mapping cross in the region corresponding to the instant nucleic acid sequence. This, however, is generally not necessary for mapping methods.

[0613] The methods according to the present invention result in plants having enhanced yield-related traits, as described hereinbefore. These traits may also be combined with other economically advantageous traits, such as further yield-enhancing traits, tolerance to other abiotic and biotic stresses, traits modifying various architectural features and/or biochemical and/or physiological features.

[0614] The term “table A5” used in this specification is to be taken to specify the content of table A5a and table A5b. The term “table A5a” used in this specification is to be taken to specify the content of table A5a. The term “table A5b” used in this specification is to be taken to specify the content of table A5b. In one preferred embodiment, the term “table A5” means table A5b.

[0615] In one embodiment the invention relates to subject mater summarized as follows:

Item 82: A method for enhancing yield-related traits in plants relative to control plants, comprising modulating expression in a plant of a nucleic acid encoding an STO polypeptide, wherein said STO polypeptide comprises a B-box domain.
Item 83: Method according to item 82, wherein said B-box domain comprises a consensus sequences as represented by SEQ ID NO: 221.
Item 84: Method according to items 82 or 83, wherein said STO polypeptides comprises a B-box domain having at least 50%, 55%, 60%, 65%, 70%, 75%, 80%, 85%, 90%, 95% or more sequence identity to SEQ ID NO: 219 or SEQ ID NO: 220.
Item 85: Method according to any of items 82 to 84, wherein said modulated expression is effected by introducing and expressing in a plant a nucleic acid encoding an STO polypeptide.
Item 86: Method according to any of items 82 to 85, wherein said nucleic acid encoding an STO polypeptide encodes any one of the proteins listed in Table A5 or is a portion of such a nucleic acid, or a nucleic acid capable of hybridising with such a nucleic acid.
Item 87: Method according to any of items 82 to 86, wherein said nucleic acid sequence encodes an orthologue or paralogue of any of the proteins given in Table A5.
Item 88: Method according to any of items 82 to 87, wherein said enhanced yield-related traits comprise increased seedling vigour and/or altered flowering time preferably shorter flowering time relative to control plants.
Item 89: Method according to any of items 82 to 88, wherein said enhanced yield-related traits are obtained under non-stress conditions.
Item 90: Method according to any of items 85 to 89, wherein said nucleic acid is operably linked to a constitutive promoter, preferably to a GOS2 promoter, most preferably to a GOS2 promoter from rice.
Item 91: Method according to any of items 82 to 90, wherein said nucleic acid encoding an STO polypeptide is of plant origin, preferably from a monocotyledonous plant, further preferably from the family Poaceae, more preferably from the genus Oryza, most preferably from Oryza sativa.
Item 92: Plant or part thereof, including seeds, obtainable by a method according to any preceding claim, wherein said plant or part thereof comprises a recombinant nucleic acid encoding an STO polypeptide.

[0616] Item 93: An isolated nucleic acid sequence comprising a nucleic acid sequence selected from the group consisting of:
[0617] (a) an isolated nucleic acid molecule encoding the polypeptide as depicted in SEQ ID NO: 223 and/or table A5b;
[0618] (b) an isolated nucleic acid molecule as depicted in SEQ ID NO: 222 and/or table A5b;
[0619] (c) an isolated nucleic acid molecule, which, as a result of the degeneracy of the genetic code, can be derived from a polypeptide sequence depicted in table A5 and confers enhanced yield-related traits relative to control plants;
[0620] (d) an isolated nucleic acid molecule having at least 30%, 31%, 32%, 33%, 34%, 35%, 36%, 37%, 38%, 39%, 40%, 41%, 42%, 43%, 44%, 45%, 46%, 47%, 48%, 49%, 50%, 51%, 52%, 53%, 54%, 55%, 56%, 57%, 58%, 59%, 60%, 61%, 62%, 63%, 64%, 65%, 66%, 67%, 68%, 69%, 70%, 71%, 72%, 73%, 74%, 75%, 76%, 77%, 78%, 79%, 80%, 81%, 82%, 83%, 84%, 85%, 86%, 87%, 88%, 89%, 90%, 91%, 92%, 93%, 94%, 95%, 96%, 97%, 98%, or 99% sequence identity with the nucleic acid molecule sequence of a polynucleotide comprising the nucleic acid molecule depicted in table A5 and confers enhanced yield-related traits relative to control plants;
[0621] (e) an isolated nucleic acid molecule encoding a polypeptide having at least 30%, 31%, 32%, 33%, 34%, 35%, 36%, 37%, 38%, 39%, 40%, 41%, 42%, 43%, 44%, 45%, 46%, 47%, 48%, 49%, 50%, 51%, 52%, 53%, 54%, 55%, 56%, 57%, 58%, 59%, 60%, 61%, 62%, 63%, 64%, 65%, 66%, 67%, 68%, 69%, 70%, 71%, 72%, 73%, 74%, 75%, 76%, 77%, 78%, 79%, 80%, 81%, 82%, 83%, 84%, 85%, 86%, 87%, 88%, 89%, 90%, 91%, 92%, 93%, 94%, 95%, 96%, 97%, 98%, or 99% sequence identity with the amino acid sequence of the polypeptide encoded by the nucleic acid molecule of (a) to (c) and confers enhanced yield-related traits relative to control plants;
[0622] (f) an isolated nucleic acid molecule which hybridizes with a nucleic acid molecule of (a) to (c) under stringent hybridization conditions and confers enhanced yield-related traits relative to control plants;
[0623] (g) an isolated nucleic acid molecule encoding a polypeptide comprising the consensus sequence or one or more polypeptide motifs as shown FIG. 15 and preferably having the activity represented by a nucleic acid molecule comprising a polynucleotide as depicted in table A5;
[0624] (h) an isolated nucleic acid molecule encoding a polypeptide having the activity represented by a protein as depicted in table A5 and confering enhanced yield-related traits relative to control plants; and
[0625] (i) a nucleic acid molecule which is obtainable by screening a suitable nucleic acid library under stringent hybridization conditions with a probe comprising a complementary sequence of a nucleic acid molecule of (a) or (b) or with a fragment thereof, having at least 15 nt, preferably 20 nt, 30 nt, 50 nt, 100 nt, 200 nt or 500 nt of a nucleic acid molecule complementary to a nucleic acid molecule sequence characterized in (a) to (e) and encoding a polypeptide having the activity represented by a protein comprising a polypeptide as depicted in table A5;
[0626] whereby the nucleic acid molecule according to (a) to (i) is at least in one or more nucleotides different from the sequence depicted in table A5a and preferably which encodes a protein which differs at least in one or more amino acids from the protein sequences depicted in table A5a.
   Item 94: Construct comprising:
   (a) nucleic acid encoding an STO polypeptide as defined in any of items 82 to 84 and 93;
   (b) one or more control sequences capable of driving expression of the nucleic acid sequence of (a); and optionally
   (c) a transcription termination sequence.
   Item 95: Construct according to item 94, wherein one of said control sequences is a constitutive promoter, preferably a GOS2 promoter, most preferably a GOS2 promoter from rice.
   Item 96:Use of a construct according to any of items 94 to 95 in a method for making plants having enhanced yield-related traits, preferably increased seedling vigour and/or altered flowering time, particularly shorter flowering time relative to control plants.
   Item 97: Plant, plant part or plant cell transformed with a construct according to any of items 94 to 95.
   Item 98: Method for the production of a transgenic plant having enhanced yield-related traits, preferably increased seedling vigour and/or altered flowering time, particularly shorter flowering time relative to control plants, comprising:
   (i) introducing and expressing in a plant a nucleic acid encoding an STO polypeptide as defined in any of items 82 to 84 and 93; and
   (ii) cultivating the plant cell under conditions promoting plant growth and development.
   Item 99: Transgenic plant having enhanced yield-related traits, preferably increased seedling vigour and/or altered flowering time, particularly shorter flowering time relative to control plants, resulting from increased expression of a nucleic acid encoding an STO polypeptide as defined in any of items 82 to 84 and 93, or a transgenic plant cell derived from said transgenic plant.
   Item 100: Transgenic plant according to item 92, 97 or 99, or a transgenic plant cell derived thereof, wherein said plant is a crop plant or a monocot or a cereal, such as rice, maize, wheat, barley, millet, rye, triticale, sorghum and oats.
   Item 101: Harvestable parts of a plant according to item 100, wherein said harvestable parts are preferably shoot biomass and/or seeds.
   Item 102: Products derived from a plant according to item 100 and/or from harvestable parts of a plant according to item 101.
   Item 103: Use of a nucleic acid encoding an STO polypeptide in increasing seedling vigour and/or altering flowering time, particularly shortening flowering time relative to control plants.

[0627] According to a further embodiment of the present invention, there is also provided an isolated polypeptide comprising a polypeptide sequence selected from the group consisting of:

(i) an amino acid sequence encoded by any one of the nucleic acids represented by Item 93;
(ii) an amino acid sequence having, in increasing order of preference, at least 50%, 55%, 60%, 65%, 70%, 75%, 80%, 85%, 90%, 95%, 96%, 97%, 98%, 99% or more sequence identity to the amino acid sequence of (i);
(iii) derivatives of any of the amino acid sequences given in (i) or (ii) above.

[0628] In a further embodiment of the invention it has now been found that modulating expression in a plant of a nucleic acid encoding a UGE polypeptide gives plants having enhanced yield-related traits relative to control plants. According to a first embodiment, the present invention provides a method for enhancing yield-related traits in plants relative to control plants, comprising modulating expression in a plant of a nucleic acid encoding a UGE polypeptide.

[0629] A preferred method for modulating (preferably, increasing) expression of a nucleic acid encoding a UGE polypeptide is by introducing and expressing in a plant a nucleic acid encoding a UGE polypeptide.

[0630] Any reference hereinafter to a “protein useful in the methods of the invention” is taken to mean a UGE polypeptide. Any reference hereinafter to a “nucleic acid useful in the methods of the invention” is taken to mean a nucleic acid capable of encoding such a UGE polypeptide. The nucleic acid to be introduced into a plant (and therefore useful in performing the methods of the invention) is any nucleic acid encoding the type of protein which will now be described, hereinafter also named “UGE nucleic acid” or “UGE gene”. UGE polypeptides and UGE nucleic acids have been described before (Maxwell and Robichon-Szulmajster (1960); J. Biol. Chem. 235 (1960) 308-312; Wilson, D. B. and Hogness, D. S. (1964). J. Biol. Chem. 239 2469-2481; reviewed by Frey FASEB J. 1996 March; 10(4):461-70; Thoden et al. (1997). Biochemistry 36:6294-6304; Dormann and Benning 1998; Shaw et al. 2003. Mol. Biochem. Parasitol. 126, 173-180; Barber et al. 2006).

[0631] A “UGE polypeptide” comprises an epimerase domain and typically has UDP-Glucose-4-epimerase activity. Epimerase domain refers to a sequence of varying length, in average around 200 amino acids long, conserved amongst epimerases (InterPro reference IPR005886; Pfam reference: PF01370).

[0632] UGE polypeptides can be found by searching in specialized databases such as Pfam, (Finn et al. Nucleic Acids Research (2006) Database Issue 34:D247-D251). Pfam compiles a large collection of multiple sequence alignments and hidden Markov models (HMM) covering many common protein domains and families and is available through the Sanger Institute in the United Kingdom. Trusted matches as considered in the Pfam database are those sequences scoring higher than the gathering cut-off threshold. The gathering cutoff threshold of the epimerase domain in the Pfam HMM_fs method is −46.3 and in the Pfam HMM_fs method is 16.7. However potential matches, comprising true epimerase domains, may still fall under the gathering cut-off. Preferably a UGE polypeptide useful in the methods of the invention is a protein having one or more domains in their sequence that exceed the gathering cutoff of the Pfam protein domain family PF01370, known as epimerase or NAD dependent epimerase/dehydratase family domain.

[0633] Alternatively, an epimerase domain in a polypeptide may be identified by performing a sequence comparison with known polypeptides comprising a epimerase domain and establishing the similarity in the region of the epimerase domain. The sequences may be aligned using any of the methods well known in the art such as Blast algorithms. The probability for the alignment to occur with a given sequence is taken as basis for identifying similar polypeptides. A parameter that is typically used to represent such probability is called e-value. The E-value is a measure of the reliability of the S score. The S score is a measure of the similarity of the query to the sequence shown. The e-value describes how often a given S score is expected to occur at random. The e-value cut-off may be as high as 1.0. The typical threshold for a trusted e-value from a BLAST search output using an epimerase polypeptide as query sequence is lower than e5(=10-5), 1.e-10, 1.e-15, 1.e-20, 1.e-25, 1.e-50, 1.e-75, 1.e-100, 1.e-200, 1.e-300, 1.e-400, 1.e-500, 1.e-600, 1.e-700 and 1.e-800. Preferably UGE polypeptides useful in the methods of the invention comprise a sequence having in increasing order of preference an e-value lower than e-5(=10-5), 1.e-10, 1.e-15, 1.e-20, 1.e-25, 1.e-50, 1.e-75, 1.e-100, 1.e-200, 1.e-300, 1.e-400, 1.e-500, 1.e-600, 1.e-700 and 1.e-800 in an alignment with an epimerase domain found in a known UGE polypeptide, such as for example SEQ ID NO: 225.

[0634] A preferred UGE polypeptide useful in the methods of the invention refers to a polypeptide comprising an epimerase domain, such domain having in increasing order of preference at least 70%, 75%, 80%, 85%, 90%, 95%, 97% or more sequence identity to SEQ ID NO: 275 (sequence representing the epimerase domain comprised in SEQ ID NO: 225).

[0635] Examples of UGE polypeptides useful in the methods of the invention are given in Table A6. The amino acid coordinates of the epimerase domain in the representative UGE protein as represented by SEQ ID NO: 225 are given in Table C. The sequence of the epimerase domain comprised in SEQ ID NO: 225 is given in SEQ ID NO: 275).

[0636] Preferred UGE polypeptides useful in the methods of the invention are those having in increasing order of preference at least 70%, 75%, 80%, 85%, 90%, 95%, 96%; 98% or more sequence identity to any of the polypeptides given in Table A6.

[0637] UGE polypeptides typically comprise conserved motifs relevant to their enzymatic activity such as i) Motif 8 involved in binding of the UGE protein to the cofactor NAD+ and represented by GXXGXXG (SEQ ID NO: 276) and ii) Motif 9 located in the active site as represented by YGRT/S (SEQ ID NO: 277), wherein the G can be substituted by any other non polar amino acid and the R by any other polar amino acid.

[0638] UGE polypeptides may comprise in addition to the epimerase domain one or more of the following conserved motifs: (i) Motif 10 as represented by SEQ ID NO: 278, which comprises the NAD+ binding motif, (ii) Motif 11 as represented by SEQ ID NO: 279 and iii) Motif 12 as represented by SEQ ID: 280. FIG. 19 shows the conserved motifs Motif 8 to Motif 12 and their relative position in the UGE polypeptide sequence represented by SEQ ID NO: 225.

[0639] Therefore, preferred UGE polypeptides useful in the method of the invention, comprise in addition to the epimerase domain any one or more of the following conserved motifs:
[0640] (i) Motif 8 as represented by SEQ ID NO: 276;
[0641] (ii) Motif 9 as represented by SEQ ID NO: 277 wherein the G can be substituted by any other non polar amino acid and the R by any other polar amino acid;
[0642] (iii) Motif 10 as represented by SEQ ID NO: 278, wherein 1, 2, 3 or 4 mismatches are allowed;
[0643] (iv) Motif 11 as represented by SEQ ID NO: 279,
[0644] (v) Motif 12 as represented by SEQ ID NO: 280, wherein 1, 2, 3 or 4 mismatches are allowed.

[0645] The polarity of the 20 essential amino acids in given in Table 3. Most frequently the amino acids comprised in polypeptides are alpha amino acids having an amine and a carboxyl group attached to the same carbon, the alpha carbon, which amino acid molecules often comprise a side chain attached to the alpha carbon. Table 3 shows the classification of amino acids based on the physical and biochemical properties of the side chain.

TABLE 3
Classification of amino acids according to the side chain properties.

| | | | | Side chain | |
|---|---|---|---|---|---|
| | | | Side chain | acidity | Hydropathy |
| Amino Acid | 3-Letter | 1-Letter | polarity | or basicity | index |
| Arginine | Arg | R | polar | basic | −4.5 |
| Asparagine | Asn | N | polar | neutral | −3.5 |
| Aspartic acid | Asp | D | polar | acidic | −3.5 |
| Cysteine | Cys | C | polar | neutral | 2.5 |
| Glutamic acid | Glu | E | polar | acidic | −3.5 |
| Glutamine | Gln | Q | polar | neutral | −3.5 |
| Histidine | His | H | polar | basic | −3.2 |
| Lysine | Lys | K | polar | basic | −3.9 |
| Serine | Ser | S | polar | neutral | −0.8 |
| Threonine | Thr | T | polar | neutral | −0.7 |
| Tyrosine | Tyr | Y | polar | neutral | −1.3 |
| Alanine | Ala | A | nonpolar | neutral | 1.8 |
| Glycine | Gly | G | nonpolar | neutral | −0.4 |
| Isoleucine | Ile | I | nonpolar | neutral | 4.5 |
| Leucine | Leu | L | nonpolar | neutral | 3.8 |
| Methionine | Met | M | nonpolar | neutral | 1.9 |
| Phenylalanine | Phe | F | nonpolar | neutral | 2.8 |
| Proline | Pro | P | nonpolar | neutral | −1.6 |
| Tryptophan | Trp | W | nonpolar | neutral | −0.9 |
| Valine | Val | V | nonpolar | neutral | 4.2 |

[0646] Examples of UGE polypeptides comprising one or more of the conserved motifs Motif 8 to Motif 12 are given in Example 1. FIG. 20 shows the position of the conserved motifs in those UGE polypeptides.

[0647] Additionally UGE polypeptides may comprise a signal polypeptide functional in subcellular localisation of the protein in a cell. For example SEQ ID NO: 225 comprises a putative secretory pathway signal peptide located between amino acid 13 and 37, with a putative cleavage site between amino acid 36 and 37.

[0648] UGE polypeptides may be modified further in the cell, for example, by cleavage of signal peptides to produce a so-called, mature UGE polypeptide. A preferred derivative of a UGE polypeptide useful in the methods of the invention is that resulting from removal of the signalling peptide and corresponding to the mature UGE polypeptide.

[0649] Preferably, the polypeptide sequence which when used in the construction of a phylogenetic tree, such as the one depicted in FIG. 21, clusters with the group comprising the amino acid sequence represented by SEQ ID NO: 225 (Os_UGE2) or alternatively, when in a tree such as that of FIG. 1 in Rosti et al. 2007 (The Plant Cell 19:1565-1579) clusters with group comprising AtUGE2.

[0650] The term “domain” and “motif' is defined in the “definitions” section herein. Specialist databases exist for the identification of domains, for example, SMART (Schultz et al. (1998) Proc. Natl. Acad. Sci. USA 95, 5857-5864; Letunic et al. (2002) Nucleic Acids Res 30, 242-244), InterPro (Mulder et al., (2003) Nucl. Acids. Res. 31, 315-318), Prosite (Bucher and Bairoch (1994), A generalized profile syntax for biomolecular sequences motifs and its function in automatic sequence interpretation. (In) ISMB-94; Proceedings 2nd International Conference on Intelligent Systems for Molecular Biology. Altman R., Brutlag D., Karp P., Lathrop R., Searls D., Eds., pp 53-61, AAAI Press, Menlo Park; Hulo et al., Nucl. Acids. Res. 32:D134-D137, (2004)), or Pfam (Bateman et al., Nucleic Acids Research 30(1): 276-280 (2002)). A set of tools for in silico analysis of protein sequences is available on the ExPASy proteomics server (Swiss Institute of Bioinformatics (Gasteiger et al., ExPASy: the proteomics server for in-depth protein knowledge and analysis, Nucleic Acids Res. 31:3784-3788 (2003)). Domains or motifs may also be identified using routine techniques, such as by sequence alignment.

[0651] Methods for the alignment of sequences for comparison are well known in the art, such methods include GAP, BESTFIT, BLAST, FASTA and TFASTA. GAP uses the algorithm of Needleman and Wunsch ((1970) J Mol Biol 48: 443-453) to find the global (i.e. spanning the complete sequences) alignment of two sequences that maximizes the number of matches and minimizes the number of gaps. The BLAST algorithm (Altschul et al. (1990) J Mol Biol 215: 403-10) calculates percent sequence identity and performs a statistical analysis of the similarity between the two sequences. The software for performing BLAST analysis is publicly available through the National Centre for Biotechnology Information (NCBI). Homologues may readily be identified using, for example, the ClustalW multiple sequence alignment algorithm (version 1.83), with the default pairwise alignment parameters, and a scoring method in percentage. Global percentages of similarity and identity may also be determined using one of the methods available in the MatGAT software package (Campanella et al., BMC Bioinformatics. 2003 Jul. 10; 4:29. MatGAT: an application that generates similarity/identity matrices using protein or DNA sequences.). Minor manual editing may be performed to optimise alignment between conserved motifs, as would be apparent to a person skilled in the art. Furthermore, instead of using full-length sequences for the identification of homologues, specific domains may also be used. The sequence identity values may be determined over the entire nucleic acid or amino acid sequence or over selected domains or conserved motif(s), using the programs mentioned above using the default parameters.

[0652] Furthermore, UGE polypeptides (at least in their native form) typically have UDP-Glucose 4-epimerase or UDP-Galactose 4-epimerase activity. In addition UGE polypeptides useful in the methods of the invention may also be enzymatically inactive. Tools and techniques for measuring UDP_Glucose 4-epimerase and UDP-Galactose 4-epimerase activity are well known in the art. Further details on the reaction properties or activity as well as examples of UGE polypeptides are well known in the art and can be found in specialized databases such as BRENDA (The Comprehensive Enzyme Information System) developed and maintained at the University of Cologne (Germany). In vivo assays include the complementation of defective UDP_Glucose 4-epimerase activity in microorganisms carrying mutations in genes encoding UGE polypeptides, e.g. the Scharomyces cerevisiae strain carrying a deficiency in the gene encoding the GAL10 protein (Dormann and Benning. 1996. Arch Biochem Biophys. 327(1):27-34). Methods to purify UGE polypeptides and to measure the epimearase activity in vitro have also been described (Barber 2006).

[0653] The present invention is illustrated by transforming plants with the nucleic acid sequence represented by SEQ ID NO: 224, encoding the polypeptide sequence of SEQ ID NO: 225. However, performance of the invention is not restricted to these sequences; the methods of the invention may advantageously be performed using any UGE-encoding nucleic acid or UGE polypeptide as defined herein.

[0654] Examples of nucleic acids encoding UGE polypeptides are given in Table A6 of Example 1 herein. Such nucleic acids are useful in performing the methods of the invention. The amino acid sequences given in Table A6 of Example 1 are example sequences of orthologues and paralogues of the UGE polypeptide represented by SEQ ID NO: 225, the terms “orthologues” and “paralogues” being as defined herein. Further orthologues and paralogues may readily be identified by performing a so-called reciprocal blast search. Typically, this involves a first BLAST involving BLASTing a query sequence (for example using any of the sequences listed in Table A6 of Example 1) against any sequence database, such as the publicly available NCBI database. BLASTN or TBLASTX (using standard default values) are generally used when starting from a nucleotide sequence, and BLASTP or TBLASTN (using standard default values) when starting from a protein sequence. The BLAST results may optionally be filtered. The full-length sequences of either the filtered results or non-filtered results are then BLASTed back (second BLAST) against sequences from the organism from which the query sequence is derived (where the query sequence is SEQ ID NO: 224 or SEQ ID NO: 225, the second BLAST would therefore be against rice sequences). The results of the first and second BLASTs are then compared. A paralogue is identified if a high-ranking hit from the first blast is from the same species as from which the query sequence is derived, a BLAST back then ideally results in the query sequence amongst the highest hits; an orthologue is identified if a high-ranking hit in the first BLAST is not from the same species as from which the query sequence is derived, and preferably results upon BLAST back in the query sequence being among the highest hits.

[0655] High-ranking hits are those having a low E-value. The lower the E-value, the more significant the score (or in other words the lower the chance that the hit was found by chance). Computation of the E-value is well known in the art. In addition to E-values, comparisons are also scored by percentage identity. Percentage identity refers to the number of identical nucleotides (or amino acids) between the two compared nucleic acid (or polypeptide) sequences over a particular length. In the case of large families, ClustalW may be used, followed by a neighbour joining tree, to help visualize clustering of related genes and to identify orthologues and paralogues.

[0656] Nucleic acid variants may also be useful in practising the methods of the invention. Examples of such variants include nucleic acids encoding homologues and derivatives of any one of the amino acid sequences given in Table A6 of Example 1, the terms “homologue” and “derivative” being as defined herein. Also useful in the methods of the invention are nucleic acids encoding homologues and derivatives of orthologues or paralogues of any one of the amino acid sequences given in Table A6 of Example 1. Homologues and derivatives useful in the methods of the present invention have substantially the same biological and functional activity as the unmodified protein from which they are derived.

[0657] Further nucleic acid variants useful in practising the methods of the invention include portions of nucleic acids encoding UGE polypeptides, nucleic acids hybridising to nucleic acids encoding UGE polypeptides, splice variants of nucleic acids encoding UGE polypeptides, allelic variants of nucleic acids encoding UGE polypeptides and variants of nucleic acids encoding UGE polypeptides obtained by gene shuffling. The terms hybridising sequence, splice variant, allelic variant and gene shuffling are as described herein.

[0658] Nucleic acids encoding UGE polypeptides need not be full-length nucleic acids, since performance of the methods of the invention does not rely on the use of full-length nucleic acid sequences. According to the present invention, there is provided a method for enhancing yield-related traits in plants, comprising introducing and expressing in a plant a portion of any one of the nucleic acid sequences given in Table A6 of Example 1, or a portion of a nucleic acid encoding an orthologue, paralogue or homologue of any of the amino acid sequences given in Table A6 of Example 1.

[0659] A portion of a nucleic acid may be prepared, for example, by making one or more deletions to the nucleic acid. The portions may be used in isolated form or they may be fused to other coding (or non-coding) sequences in order to, for example, produce a protein that combines several activities. When fused to other coding sequences, the resultant polypeptide produced upon translation may be bigger than that predicted for the protein portion.

[0660] Portions useful in the methods of the invention, encode a UGE polypeptide as defined herein, and have substantially the same biological activity as the amino acid sequences given in Table A6 of Example 1. Preferably, the portion is a portion of any one of the nucleic acids given in Table A of Example 1, or is a portion of a nucleic acid encoding an orthologue or paralogue of any one of the amino acid sequences given in Table A6 of Example 1. Preferably the portion is at least 250, 500, 550, 600, 650, 700, 750, 800, 850, 900, 950, 1000 consecutive nucleotides in length, the consecutive nucleotides being of any one of the nucleic acid sequences given in Table A6 of Example 1, or of a nucleic acid encoding an orthologue or paralogue of any one of the amino acid sequences given in Table A6 of Example 1. Most preferably the portion is a portion of the nucleic acid of SEQ ID NO: 224. Preferably, the portion encodes an amino acid sequence which when used in the construction of a phylogenetic tree, such as the one depicted in FIG. 21, clusters with the group comprising the amino acid sequence represented by SEQ ID NO: 225 (Os_UGE2) or alternatively, when in a tree such as that of FIG. 1 in Rosti et al. 2007 (The Plant Cell 19:1565-1579) clusters with group comprising AtUGE2.

[0661] Another nucleic acid variant useful in the methods of the invention is a nucleic acid capable of hybridising, under reduced stringency conditions, preferably under stringent conditions, with a nucleic acid encoding a UGE polypeptide as defined herein, or with a portion as defined herein.

[0662] According to the present invention, there is provided a method for enhancing yield-related traits in plants, comprising introducing and expressing in a plant a nucleic acid capable of hybridizing to any one of the nucleic acids given in Table A6 of Example 1, or comprising introducing and expressing in a plant a nucleic acid capable of hybridising to a nucleic acid encoding an orthologue, paralogue or homologue of any of the nucleic acid sequences given in Table A6 of Example 1.

[0663] Hybridising sequences useful in the methods of the invention encode a UGE polypeptide as defined herein, having substantially the same biological activity as the amino acid sequences given in Table A6 of Example 1. Preferably, the hybridising sequence is capable of hybridising to any one of the nucleic acids given in Table A6 of Example 1, or to a portion of any of these sequences, a portion being as defined above, or the hybridising sequence is capable of hybridising to a nucleic acid encoding an orthologue or paralogue of any one of the amino acid sequences given in Table A6 of Example 1. Most preferably, the hybridising sequence is capable of hybridising to a nucleic acid as represented by SEQ ID NO: 224 or to a portion thereof.

[0664] Preferably, the hybridising sequence encodes a polypeptide with an amino acid sequence which when used in the construction of a phylogenetic tree, such as the one depicted in FIG. 21, clusters with the group comprising the amino acid sequence represented by SEQ ID NO: 225 (Os_UGE2) or alternatively when used in the construction of a phylogenetic tree such as that of FIG. 1 in Rosti et al. 2007 (The Plant Cell 19:1565-1579) clusters with group comprising AtUGE2.

[0665] Another nucleic acid variant useful in the methods of the invention is a splice variant encoding a UGE polypeptide as defined hereinabove, a splice variant being as defined herein.

[0666] According to the present invention, there is provided a method for enhancing yield-related traits in plants, comprising introducing and expressing in a plant a splice variant of any one of the nucleic acid sequences given in Table A6 of Example 1, or a splice variant of a nucleic acid encoding an orthologue, paralogue or homologue of any of the amino acid sequences given in Table A6 of Example 1.

[0667] Preferred splice variants are splice variants of a nucleic acid represented by SEQ ID NO: 224, or a splice variant of a nucleic acid encoding an orthologue or paralogue of SEQ ID NO: 225. Preferably, the amino acid sequence encoded by the splice variant, when used in the construction of a phylogenetic tree, such as the one depicted in FIG. 21, clusters with the group comprising the amino acid sequence represented by SEQ ID NO: 225 (Os_UGE2) or alternatively when used in the construction of a phylogenetic tree such as that of FIG. 1 in Rosti et al. 2007 (The Plant Cell 19:1565-1579) clusters with group comprising AtUGE2.

[0668] Another nucleic acid variant useful in performing the methods of the invention is an allelic variant of a nucleic acid encoding a UGE polypeptide as defined hereinabove, an allelic variant being as defined herein.

[0669] According to the present invention, there is provided a method for enhancing yield-related traits in plants, comprising introducing and expressing in a plant an allelic variant of any one of the nucleic acids given in Table A6 of Example 1, or comprising introducing and expressing in a plant an allelic variant of a nucleic acid encoding an orthologue, paralogue or homologue of any of the amino acid sequences given in Table A6 of Example 1.

[0670] The allelic variants useful in the methods of the present invention have substantially the same biological activity as the UGE polypeptide of SEQ ID NO: 225 and any of the amino acids depicted in Table A6 of Example 1. Allelic variants exist in nature, and encompassed within the methods of the present invention is the use of these natural alleles. Preferably, the allelic variant is an allelic variant of SEQ ID NO: 224 or an allelic variant of a nucleic acid encoding an orthologue or paralogue of SEQ ID NO: 225. Preferably, the amino acid sequence encoded by the allelic variant, when used in the construction of a phylogenetic tree, such as the one depicted in FIG. 21, clusters with the group comprising the amino acid sequence represented by SEQ ID NO: 225 (Os_UGE2) or alternatively when used in the construction of a phylogenetic tree such as that of FIG. 1 in Rosti et al. 2007 (The Plant Cell 19:1565-1579) clusters with group comprising AtUGE2.

[0671] Gene shuffling or directed evolution may also be used to generate variants of nucleic acids encoding UGE polypeptides as defined above; the term “gene shuffling” being as defined herein.

[0672] According to the present invention, there is provided a method for enhancing yield-related traits in plants, comprising introducing and expressing in a plant a variant of any one of the nucleic acid sequences given in Table A6 of Example 1, or comprising introducing and expressing in a plant a variant of a nucleic acid encoding an orthologue, paralogue or homologue of any of the amino acid sequences given in Table A6 of Example 1, which variant nucleic acid is obtained by gene shuffling.

[0673] Preferably, the amino acid sequence encoded by the variant nucleic acid obtained by gene shuffling, when used in the construction of a phylogenetic tree such as the one depicted in FIG. 21, clusters with the group comprising the amino acid sequence represented by SEQ ID NO: 225 (Os_UGE2) or alternatively when used in the construction of a phylogenetic tree such as that of FIG. 1 in Rosti et al. 2007 (The Plant Cell 19:1565-1579) clusters with group comprising AtUGE2.

[0674] Furthermore, nucleic acid variants may also be obtained by site-directed mutagenesis. Several methods are available to achieve site-directed mutagenesis, the most common being PCR based methods (Current Protocols in Molecular Biology. Wiley Eds.).

[0675] Nucleic acids encoding UGE polypeptides may be derived from any natural or artificial source. The nucleic acid may be modified from its native form in composition and/or genomic environment through deliberate human manipulation. Preferably the UGE polypeptide-encoding nucleic acid is from a plant, further preferably from a monocotyledonous plant, more preferably from the family Poaceae, most preferably the nucleic acid is from Oryza sativa.

[0676] Performance of the methods of the invention gives plants having enhanced yield-related traits. In particular performance of the methods of the invention gives plants having increased yield, especially increased seed yield relative to control plants. The terms “yield” and “seed yield” are described in more detail in the “definitions” section herein.

[0677] Reference herein to enhanced yield-related traits is taken to mean an increase in biomass (weight) of one or more parts of a plant, which may include aboveground (harvestable) parts and/or (harvestable) parts below ground. In particular, such harvestable parts are seeds, and performance of the methods of the invention results in plants having increased seed yield relative to the seed yield of control plants.

[0678] Taking corn as an example, a yield increase may be manifested as one or more of the following: increase in the number of plants established per hectare or acre, an increase in the number of ears per plant, an increase in the number of rows, number of kernels per row, kernel weight, thousand kernel weight, ear length/diameter, increase in the seed filling rate (which is the number of filled seeds divided by the total number of seeds and multiplied by 100), among others. Taking rice as an example, a yield increase may manifest itself as an increase in one or more of the following: number of plants per hectare or acre, number of panicles per plant, number of spikelets per panicle, number of flowers (florets) per panicle (which is expressed as a ratio of the number of filled seeds over the number of primary panicles), increase in the seed filling rate (which is the number of filled seeds divided by the total number of seeds and multiplied by 100), increase in thousand kernel weight, among others.

[0679] The present invention provides a method for increasing yield, especially seed yield of plants, relative to control plants, which method comprises modulating expression, preferably increasing expression, in a plant of a nucleic acid encoding a UGE polypeptide as defined herein.

[0680] Since the transgenic plants according to the present invention have increased yield, it is likely that these plants exhibit an increased growth rate (during at least part of their life cycle), relative to the growth rate of control plants at a corresponding stage in their life cycle.

[0681] The increased growth rate may be specific to one or more parts of a plant (including seeds), or may be throughout substantially the whole plant. Plants having an increased growth rate may have a shorter life cycle. The life cycle of a plant may be taken to mean the time needed to grow from a dry mature seed up to the stage where the plant has produced dry mature seeds, similar to the starting material. This life cycle may be influenced by factors such as early vigour, growth rate, greenness index, flowering time and speed of seed maturation. The increase in growth rate may take place at one or more stages in the life cycle of a plant or during substantially the whole plant life cycle. Increased growth rate during the early stages in the life cycle of a plant may reflect enhanced vigour. The increase in growth rate may alter the harvest cycle of a plant allowing plants to be sown later and/or harvested sooner than would otherwise be possible (a similar effect may be obtained with earlier flowering time). If the growth rate is sufficiently increased, it may allow for the further sowing of seeds of the same plant species (for example sowing and harvesting of rice plants followed by sowing and harvesting of further rice plants all within one conventional growing period). Similarly, if the growth rate is sufficiently increased, it may allow for the further sowing of seeds of different plants species (for example the sowing and harvesting of corn plants followed by, for example, the sowing and optional harvesting of soybean, potato or any other suitable plant). Harvesting additional times from the same rootstock in the case of some crop plants may also be possible. Altering the harvest cycle of a plant may lead to an increase in annual biomass production per acre (due to an increase in the number of times (say in a year) that any particular plant may be grown and harvested). An increase in growth rate may also allow for the cultivation of transgenic plants in a wider geographical area than their wild-type counterparts, since the territorial limitations for growing a crop are often determined by adverse environmental conditions either at the time of planting (early season) or at the time of harvesting (late season). Such adverse conditions may be avoided if the harvest cycle is shortened. The growth rate may be determined by deriving various parameters from growth curves, such parameters may be: T-Mid (the time taken for plants to reach 50% of their maximal size) and T-90 (time taken for plants to reach 90% of their maximal size), amongst others.

[0682] According to a preferred feature of the present invention, performance of the methods of the invention gives plants having an increased growth rate relative to control plants. Therefore, according to the present invention, there is provided a method for increasing the growth rate of plants, which method comprises modulating expression, preferably increasing expression, in a plant of a nucleic acid encoding a UGE polypeptide as defined herein.

[0683] An increase in yield and/or growth rate occurs whether the plant is under non-stress conditions or whether the plant is exposed to various stresses compared to control plants. Plants typically respond to exposure to stress by growing more slowly. In conditions of severe stress, the plant may even stop growing altogether. Mild stress on the other hand is defined herein as being any stress to which a plant is exposed which does not result in the plant ceasing to grow altogether without the capacity to resume growth. Mild stress in the sense of the invention leads to a reduction in the growth of the stressed plants of less than 40%, 35% or 30%, preferably less than 25%, 20% or 15%, more preferably less than 14%, 13%, 12%, 11% or 10% or less in comparison to the control plant under non-stress conditions. Due to advances in agricultural practices (irrigation, fertilization, pesticide treatments) severe stresses are not often encountered in cultivated crop plants. As a consequence, the compromised growth induced by mild stress is often an undesirable feature for agriculture. Mild stresses are the everyday biotic and/or abiotic (environmental) stresses to which a plant is exposed. Abiotic stresses may be due to drought or excess water, anaerobic stress, salt stress, chemical toxicity, oxidative stress and hot, cold or freezing temperatures. The abiotic stress may be an osmotic stress caused by a water stress (particularly due to drought), salt stress, oxidative stress or an ionic stress. Biotic stresses are typically those stresses caused by pathogens, such as bacteria, viruses, fungi and insects.

[0684] In particular, the methods of the present invention may be performed under non-stress conditions or under conditions of mild drought to give plants having increased yield relative to control plants. As reported in Wang et al. (Planta (2003) 218: 1-14), abiotic stress leads to a series of morphological, physiological, biochemical and molecular changes that adversely affect plant growth and productivity. Drought, salinity, extreme temperatures and oxidative stress are known to be interconnected and may induce growth and cellular damage through similar mechanisms. Rabbani et al. (Plant Physiol (2003) 133: 1755-1767) describes a particularly high degree of “cross talk” between drought stress and high-salinity stress. For example, drought and/or salinisation are manifested primarily as osmotic stress, resulting in the disruption of homeostasis and ion distribution in the cell. Oxidative stress, which frequently accompanies high or low temperature, salinity or drought stress, may cause denaturing of functional and structural proteins. As a consequence, these diverse environmental stresses often activate similar cell signalling pathways and cellular responses, such as the production of stress proteins, up-regulation of anti-oxidants, accumulation of compatible solutes and growth arrest. The term “non-stress” conditions as used herein are those environmental conditions that allow optimal growth of plants. Persons skilled in the art are aware of normal soil conditions and climatic conditions for a given location.

[0685] Performance of the methods of the invention gives plants grown under non-stress conditions or under mild drought conditions increased yield relative to control plants grown under comparable conditions. Therefore, according to the present invention, there is provided a method for increasing yield in plants grown under non-stress conditions or under mild drought conditions, which method comprises increasing expression in a plant of a nucleic acid encoding a UGE polypeptide.

[0686] Performance of the methods of the invention gives plants grown under conditions of nutrient deficiency, particularly under conditions of nitrogen deficiency, increased yield relative to control plants grown under comparable conditions. Therefore, according to the present invention, there is provided a method for increasing yield in plants grown under conditions of nutrient deficiency, which method comprises increasing expression in a plant of a nucleic acid encoding a UGE polypeptide. Nutrient deficiency may result from a lack of nutrients such as nitrogen, phosphates and other phosphorous-containing compounds, potassium, calcium, cadmium, magnesium, manganese, iron and boron, amongst others.

[0687] The present invention encompasses plants or parts thereof (including seeds) obtainable by the methods according to the present invention. The plants or parts thereof comprise a nucleic acid transgene encoding a UGE polypeptide as defined above.

[0688] The invention also provides genetic constructs and vectors to facilitate introduction and/or expression in plants of nucleic acids encoding UGE polypeptides. The gene constructs may be inserted into vectors, which may be commercially available, suitable for transforming into plants and suitable for expression of the gene of interest in the transformed cells. The invention also provides use of a gene construct as defined herein in the methods of the invention.

[0689] More specifically, the present invention provides a construct comprising:

(a) a nucleic acid encoding a UGE polypeptide as defined above;
(b) one or more control sequences capable of driving expression of the nucleic acid sequence of (a); and optionally
(c) a transcription termination sequence.

[0690] Preferably, the nucleic acid encoding a UGE polypeptide is as defined above. The term “control sequence” and “termination sequence” are as defined herein.

[0691] Plants are transformed with a vector comprising any of the nucleic acids described above. The skilled artisan is well aware of the genetic elements that must be present on the vector in order to successfully transform, select and propagate host cells containing the sequence of interest. The sequence of interest is operably linked to one or more control sequences (at least to a promoter).

[0692] Advantageously, any type of promoter, whether natural or synthetic, may be used to drive expression of the nucleic acid sequence. A constitutive promoter is particularly useful in the methods. See the “Definitions” section herein for definitions of the various promoter types.

[0693] It should be clear that the applicability of the present invention is not restricted to the UGE polypeptide-encoding nucleic acid represented by SEQ ID NO: 1, nor is the applicability of the invention restricted to expression of a UGE polypeptide-encoding nucleic acid when driven by a constitutive promoter, or when driven by a root-specific promoter.

[0694] The constitutive promoter is preferably a GOS2 promoter, preferably a GOS2 promoter from rice. Further preferably the constitutive promoter is represented by a nucleic acid sequence substantially similar to SEQ ID NO: 270, most preferably the constitutive promoter is as represented by SEQ ID NO: 270. See Table 2 in the “Definitions” section herein for further examples of constitutive promoters.

[0695] Optionally, one or more terminator sequences may be used in the construct introduced into a plant. Additional regulatory elements may include transcriptional as well as translational enhancers. Those skilled in the art will be aware of terminator and enhancer sequences that may be suitable for use in performing the invention. An intron sequence may also be added to the 5′ untranslated region (UTR) or in the coding sequence to increase the amount of the mature message that accumulates in the cytosol, as described in the definitions section. Other control sequences (besides promoter, enhancer, silencer, intron sequences, 3′UTR and/or 5′UTR regions) may be protein and/or RNA stabilizing elements. Such sequences would be known or may readily be obtained by a person skilled in the art.

[0696] The genetic constructs of the invention may further include an origin of replication sequence that is required for maintenance and/or replication in a specific cell type. One example is when a genetic construct is required to be maintained in a bacterial cell as an episomal genetic element (e.g. plasmid or cosmid molecule). Preferred origins of replication include, but are not limited to, the f1-ori and colE1.

[0697] For the detection of the successful transfer of the nucleic acid sequences as used in the methods of the invention and/or selection of transgenic plants comprising these nucleic acids, it is advantageous to use marker genes (or reporter genes). Therefore, the genetic construct may optionally comprise a selectable marker gene. Selectable markers are described in more detail in the “definitions” section herein. The marker genes may be removed or excised from the transgenic cell once they are no longer needed. Techniques for marker removal are known in the art, useful techniques are described above in the definitions section.

[0698] The invention also provides a method for the production of transgenic plants having enhanced yield-related traits relative to control plants, comprising introduction and expression in a plant of any nucleic acid encoding a UGE polypeptide as defined hereinabove.

[0699] More specifically, the present invention provides a method for the production of transgenic plants having increased enhanced yield-related traits, particularly increased (seed) yield, which method comprises:
[0700] (i) introducing and expressing in a plant or plant cell a UGE polypeptide-encoding nucleic acid; and
[0701] (ii) cultivating the plant cell under conditions promoting plant growth and development.

[0702] The nucleic acid of (i) may be any of the nucleic acids capable of encoding a UGE polypeptide as defined herein.

[0703] The nucleic acid may be introduced directly into a plant cell or into the plant itself (including introduction into a tissue, organ or any other part of a plant). According to a preferred feature of the present invention, the nucleic acid is preferably introduced into a plant by transformation. The term “transformation” is described in more detail in the “definitions” section herein.

[0704] The genetically modified plant cells can be regenerated via all methods with which the skilled worker is familiar. Suitable methods can be found in the abovementioned publications by S. D. Kung and R. Wu, Potrykus or Högen and Willmitzer.

[0705] Generally after transformation, plant cells or cell groupings are selected for the presence of one or more markers which are encoded by plant-expressible genes co-transferred with the gene of interest, following which the transformed material is regenerated into a whole plant.

[0706] To select transformed plants, the plant material obtained in the transformation is, as a rule, subjected to selective conditions so that transformed plants can be distinguished from untransformed plants. For example, the seeds obtained in the above-described manner can be planted and, after an initial growing period, subjected to a suitable selection by spraying. A further possibility consists in growing the seeds, if appropriate after sterilization, on agar plates using a suitable selection agent so that only the transformed seeds can grow into plants. Alternatively, the transformed plants are screened for the presence of a selectable marker such as the ones described above.

[0707] Following DNA transfer and regeneration, putatively transformed plants may also be evaluated, for instance using Southern analysis, for the presence of the gene of interest, copy number and/or genomic organisation. Alternatively or additionally, expression levels of the newly introduced DNA may be monitored using Northern and/or Western analysis, both techniques being well known to persons having ordinary skill in the art.

[0708] The generated transformed plants may be propagated by a variety of means, such as by clonal propagation or classical breeding techniques. For example, a first generation (or T1) transformed plant may be selfed and homozygous second-generation (or T2) transformants selected, and the T2 plants may then further be propagated through classical breeding techniques. The generated transformed organisms may take a variety of forms. For example, they may be chimeras of transformed cells and non-transformed cells; clonal transformants (e.g., all cells transformed to contain the expression cassette); grafts of transformed and untransformed tissues (e.g., in plants, a transformed rootstock grafted to an untransformed scion).

[0709] The present invention clearly extends to any plant cell or plant produced by any of the methods described herein, and to all plant parts and propagules thereof. The present invention extends further to encompass the progeny of a primary transformed or transfected cell, tissue, organ or whole plant that has been produced by any of the aforementioned methods, the only requirement being that progeny exhibit the same genotypic and/or phenotypic characteristic(s) as those produced by the parent in the methods according to the invention.

[0710] The invention also includes host cells containing an isolated nucleic acid encoding a UGE polypeptide as defined hereinabove. Preferred host cells according to the invention are plant cells. Host plants for the nucleic acids or the vector used in the method according to the invention, the expression cassette or construct or vector are, in principle, advantageously all plants, which are capable of synthesizing the polypeptides used in the inventive method.

[0711] The methods of the invention are advantageously applicable to any plant. Plants that are particularly useful in the methods of the invention include all plants which belong to the superfamily Viridiplantae, in particular monocotyledonous and dicotyledonous plants including fodder or forage legumes, ornamental plants, food crops, trees or shrubs. According to a preferred embodiment of the present invention, the plant is a crop plant. Examples of crop plants include soybean, sunflower, canola, alfalfa, rapeseed, cotton, tomato, potato and tobacco. Further preferably, the plant is a monocotyledonous plant. Examples of monocotyledonous plants include sugarcane. More preferably the plant is a cereal. Examples of cereals include rice, maize, wheat, barley, millet, rye, triticale, sorghum and oats.

[0712] The invention also extends to harvestable parts of a plant such as, but not limited to seeds, leaves, fruits, flowers, stems, roots, rhizomes, tubers and bulbs. The invention furthermore relates to products derived, preferably directly derived, from a harvestable part of such a plant, such as dry pellets or powders, oil, fat and fatty acids, starch or proteins.

[0713] According to a preferred feature of the invention, the modulated expression is increased expression. Methods for increasing expression of nucleic acids or genes, or gene products, are well documented in the art and examples are provided in the definitions section.

[0714] As mentioned above, a preferred method for modulating (preferably, increasing) expression of a nucleic acid encoding a UGE polypeptide is by introducing and expressing in a plant a nucleic acid encoding a UGE polypeptide; however the effects of performing the method, i.e. enhancing yield-related traits may also be achieved using other well known techniques, including but not limited to T-DNA activation tagging, TILLING, homologous recombination. A description of these techniques is provided in the definitions section.

[0715] The present invention also encompasses use of nucleic acids encoding UGE polypeptides as described herein and use of these UGE polypeptides in enhancing any of the aforementioned yield-related traits in plants.

[0716] Nucleic acids encoding UGE polypeptide described herein, or the UGE polypeptides themselves, may find use in breeding programmes in which a DNA marker is identified which may be genetically linked to a UGE polypeptide-encoding gene. The nucleic acids/genes, or the UGE polypeptides themselves may be used to define a molecular marker. This DNA or protein marker may then be used in breeding programmes to select plants having enhanced yield-related traits as defined hereinabove in the methods of the invention.

[0717] Allelic variants of a UGE polypeptide-encoding nucleic acid/gene may also find use in marker-assisted breeding programmes. Such breeding programmes sometimes require introduction of allelic variation by mutagenic treatment of the plants, using for example EMS mutagenesis; alternatively, the programme may start with a collection of allelic variants of so called “natural” origin caused unintentionally. Identification of allelic variants then takes place, for example, by PCR. This is followed by a step for selection of superior allelic variants of the sequence in question and which give increased yield. Selection is typically carried out by monitoring growth performance of plants containing different allelic variants of the sequence in question. Growth performance may be monitored in a greenhouse or in the field. Further optional steps include crossing plants in which the superior allelic variant was identified with another plant. This could be used, for example, to make a combination of interesting phenotypic features.

[0718] Nucleic acids encoding UGE polypeptides may also be used as probes for genetically and physically mapping the genes that they are a part of, and as markers for traits linked to those genes. Such information may be useful in plant breeding in order to develop lines with desired phenotypes. Such use of UGE polypeptide-encoding nucleic acids requires only a nucleic acid sequence of at least 15 nucleotides in length. The UGE polypeptide-encoding nucleic acids may be used as restriction fragment length polymorphism (RFLP) markers. Southern blots (Sambrook J, Fritsch E F and Maniatis T (1989) Molecular Cloning, A Laboratory Manual) of restriction-digested plant genomic DNA may be probed with the UGE-encoding nucleic acids. The resulting banding patterns may then be subjected to genetic analyses using computer programs such as MapMaker (Lander et al. (1987) Genomics 1: 174-181) in order to construct a genetic map. In addition, the nucleic acids may be used to probe Southern blots containing restriction endonuclease-treated genomic DNAs of a set of individuals representing parent and progeny of a defined genetic cross. Segregation of the DNA polymorphisms is noted and used to calculate the position of the UGE polypeptide-encoding nucleic acid in the genetic map previously obtained using this population (Botstein et al. (1980) Am. J. Hum. Genet. 32:314-331).

[0719] The production and use of plant gene-derived probes for use in genetic mapping is described in Bernatzky and Tanksley (1986) Plant Mol. Biol. Reporter 4: 37-41. Numerous publications describe genetic mapping of specific cDNA clones using the methodology outlined above or variations thereof. For example, F2 intercross populations, backcross populations, randomly mated populations, near isogenic lines, and other sets of individuals may be used for mapping. Such methodologies are well known to those skilled in the art.

[0720] The nucleic acid probes may also be used for physical mapping (i.e., placement of sequences on physical maps; see Hoheisel et al. In: Non-mammalian Genomic Analysis: A Practical Guide, Academic press 1996, pp. 319-346, and references cited therein).

[0721] In another embodiment, the nucleic acid probes may be used in direct fluorescence in situ hybridisation (FISH) mapping (Trask (1991) Trends Genet. 7:149-154). Although current methods of FISH mapping favour use of large clones (several kb to several hundred kb; see Laan et al. (1995) Genome Res. 5:13-20), improvements in sensitivity may allow performance of FISH mapping using shorter probes.

[0722] A variety of nucleic acid amplification-based methods for genetic and physical mapping may be carried out using the nucleic acids. Examples include allele-specific amplification (Kazazian (1989) J. Lab. Clin. Med 11:95-96), polymorphism of PCR-amplified fragments (CAPS; Sheffield et al. (1993) Genomics 16:325-332), allele-specific ligation (Landegren et al. (1988) Science 241:1077-1080), nucleotide extension reactions (Sokolov (1990) Nucleic Acid Res. 18:3671), Radiation Hybrid Mapping (Walter et al. (1997) Nat. Genet. 7:22-28) and Happy Mapping (Dear and Cook (1989) Nucleic Acid Res. 17:6795-6807). For these methods, the sequence of a nucleic acid is used to design and produce primer pairs for use in the amplification reaction or in primer extension reactions. The design of such primers is well known to those skilled in the art. In methods employing PCR-based genetic mapping, it may be necessary to identify DNA sequence differences between the parents of the mapping cross in the region corresponding to the instant nucleic acid sequence. This, however, is generally not necessary for mapping methods.

[0723] The methods according to the present invention result in plants having enhanced yield-related traits, as described hereinbefore. These traits may also be combined with other economically advantageous traits, such as further yield-enhancing traits, tolerance to other abiotic and biotic stresses, traits modifying various architectural features and/or biochemical and/or physiological features.

[0724] The term “table A6” used in this specification is to be taken to specify the content of table A6a and table A6b. The term “table A6a” used in this specification is to be taken to specify the content of table A6a. The term “table A6b” used in this specification is to be taken to specify the content of table A6b. In one preferred embodiment, the term “table A6” means table A6b.

[0725] In one embodiment the invention relates to subject mater summarized as follows:

Item 104: A method for enhancing yield-related traits in plants relative to control plants, comprising modulating expression in a plant of a nucleic acid encoding a UGE polypeptide.
Item 105: Method according to item 104, wherein said UGE polypeptide comprises an epimerase domain having in increasing order of preference at least 70%, 75%, 80%, 85%, 90%, 95%, 97% or more sequence identity to SEQ ID NO: 275.
Item 106: Method according to item 104 or 105, wherein said UGE polypeptide comprises one or more of the following motifs:
Motif 8 as represented by SEQ ID NO: 276;
Motif 9 as represented by SEQ ID NO: 277 wherein the G can be substituted by any other non polar amino acid and the R by any other polar amino acid;
Motif 10 as represented by SEQ ID NO: 278, wherein 1, 2, 3 or 4 mismatches are allowed;
Motif 11 as represented by SEQ ID NO: 279,
Motif 12 as represented by SEQ ID NO: 280, wherein 1, 2, 3 or 4 mismatches are allowed.
Item 107: Method according to item 104 to 106, wherein said modulated expression is effected by introducing and expressing in a plant a nucleic acid encoding a UGE polypeptide.
Item 108: Method according to any of the items 104 to 107, wherein said nucleic acid encoding a UGE polypeptide encodes any one of the proteins listed in Table A6 or is a portion of such a nucleic acid, or a nucleic acid capable of hybridising with such a nucleic acid.
Item 109: Method according to any of the items 104 to 108, wherein said nucleic acid sequence encodes an orthologue or paralogue of any of the proteins given in Table A6.
Item 110: Method according to any of the items 104 to 109, wherein said enhanced yield-related traits comprise increased yield, preferably increased seed yield relative to control plants.
Item 111: Method according to any of the items 104 to 110, wherein said enhanced yield-related traits are obtained under non-stress conditions.
Item 112: Method according to any of the items 104 to 111, wherein said enhanced yield-related traits are obtained under conditions of drought stress.
Item 113: Method according to any of the items 104 to 112, wherein said nucleic acid is operably linked to a constitutive promoter, preferably to a GOS2 promoter, most preferably to a GOS2 promoter from rice.
Item 114: Method according to any of the items 104 to 113, wherein said nucleic acid encoding a UGE polypeptide is of plant origin, preferably from a monocotyledonous plant, further preferably from the family Poaceae, more preferably from the genus Oryza, most preferably from Oryza sativa.
Item 115: Plant or part thereof, including seeds, obtainable by a method according to any of the items 104 to 114, wherein said plant or part thereof comprises a recombinant nucleic acid encoding a UGE polypeptide.
Item 116: An isolated nucleic acid sequence comprising a nucleic acid sequence selected from the group consisting of:
[0726] (a) an isolated nucleic acid molecule encoding the polypeptide as depicted in SEQ ID NO: 282, 284, 286, 288, 290, 292, 294, 296, 298, 300, 302, 304, 306, 308, 310, 312, 314, 316, 318 and/or 320 and/or table A6b;
[0727] (b) an isolated nucleic acid molecule as depicted in SEQ ID NO: 281, 283, 285, 287, 289, 291, 293, 295, 297, 299, 301, 303, 305, 307, 309, 311, 313, 315, 317 and/or 319 and/or table A6b;
[0728] (c) an isolated nucleic acid molecule, which, as a result of the degeneracy of the genetic code, can be derived from a polypeptide sequence depicted in table A6 and confers enhanced yield-related traits relative to control plants;
[0729] (d) an isolated nucleic acid molecule having at least 30%, 31%, 32%, 33%, 34%, 35%, 36%, 37%, 38%, 39%, 40%, 41%, 42%, 43%, 44%, 45%, 46%, 47%, 48%, 49%, 50%, 51%, 52%, 53%, 54%, 55%, 56%, 57%, 58%, 59%, 60%, 61%, 62%, 63%, 64%, 65%, 66%, 67%, 68%, 69%, 70%, 71%, 72%, 73%, 74%, 75%, 76%, 77%, 78%, 79%, 80%, 81%, 82%, 83%, 84%, 85%, 86%, 87%, 88%, 89%, 90%, 91%, 92%, 93%, 94%, 95%, 96%, 97%, 98%, or 99% sequence identity with the nucleic acid molecule sequence of a polynucleotide comprising the nucleic acid molecule depicted in table A6 and confers enhanced yield-related traits relative to control plants;
[0730] (e) an isolated nucleic acid molecule encoding a polypeptide having at least 30%, 31%, 32%, 33%, 34%, 35%, 36%, 37%, 38%, 39%, 40%, 41%, 42%, 43%, 44%, 45%, 46%, 47%, 48%, 49%, 50%, 51%, 52%, 53%, 54%, 55%, 56%, 57%, 58%, 59%, 60%, 61%, 62%, 63%, 64%, 65%, 66%, 67%, 68%, 69%, 70%, 71%, 72%, 73%, 74%, 75%, 76%, 77%, 78%, 79%, 80%, 81%, 82%, 83%, 84%, 85%, 86%, 87%, 88%, 89%, 90%, 91%, 92%, 93%, 94%, 95%, 96%, 97%, 98%, or 99% sequence identity with the amino acid sequence of the polypeptide encoded by the nucleic acid molecule of (a) to (c) and confers enhanced yield-related traits relative to control plants;
[0731] (f) an isolated nucleic acid molecule which hybridizes with a nucleic acid molecule of (a) to (c) under stringent hybridization conditions and confers enhanced yield-related traits relative to control plants;
[0732] (g) an isolated nucleic acid molecule encoding a polypeptide comprising the consensus sequence or one or more polypeptide motifs as shown FIG. 20 and preferably having the activity represented by a nucleic acid molecule comprising a polynucleotide as depicted in table A6;
[0733] (h) an isolated nucleic acid molecule encoding a polypeptide having the activity represented by a protein as depicted in table A6 and confering enhanced yield-related traits relative to control plants;
[0734] and
[0735] (i) a nucleic acid molecule which is obtainable by screening a suitable nucleic acid library under stringent hybridization conditions with a probe comprising a complementary sequence of a nucleic acid molecule of (a) or (b) or with a fragment thereof, having at least 15 nt, preferably 20 nt, 30 nt, 50 nt, 100 nt, 200 nt or 500 nt of a nucleic acid molecule complementary to a nucleic acid molecule sequence characterized in (a) to (e) and encoding a polypeptide having the activity represented by a protein comprising a polypeptide as depicted in table A6;
[0736] whereby the nucleic acid molecule according to (a) to (i) is at least in one or more nucleotides different from the sequence depicted in table A6a and preferably which encodes a protein which differs at least in one or more amino acids from the protein sequences depicted in table A6a.
   Item 117: Construct comprising:
[0737] (a) nucleic acid encoding a UGE polypeptide as defined in items 104 to 106 or 116;
[0738] (b) one or more control sequences capable of driving expression of the nucleic acid sequence of (a); and optionally
[0739] (c) a transcription termination sequence.
   Item 118: Construct according to item 117, wherein one of said control sequences is a constitutive promoter, preferably a GOS2 promoter, most preferably a GOS2 promoter from rice.
   Item 119: Use of a construct according to any of the items 117 to 118 in a method for making plants having enhanced yield-related traits preferably increased yield, more preferably increased seed yield relative to control plants.
   Item 120: Plant, plant part or plant cell transformed with a construct according to item 117 or 118.
   Item 121: Method for the production of a transgenic plant having increased yield, particularly increased seed yield relative to control plants, comprising:
   (i) introducing and expressing in a plant a nucleic acid encoding a UGE polypeptide as defined in items 104 to 106 or 116; and
   (ii) cultivating the plant cell under conditions promoting plant growth and development.
   Item 122: Transgenic plant having increased yield, particularly increased seed yield, relative to control plants, resulting from increased expression of a nucleic acid encoding a UGE polypeptide as defined in items 104 to 106 or 116, or a transgenic plant cell derived from said transgenic plant.
   Item 123: Transgenic plant according to item 115, 120 or 122, or a transgenic plant cell derived thereof, wherein said plant is a crop plant or a monocot or a cereal, such as rice, maize, wheat, barley, millet, rye, triticale, sorghum and oats.
   Item 124: Harvestable parts of a plant according to item 123, wherein said harvestable parts are preferably shoot biomass and/or seeds.
   Item 125: Products derived from a plant according to item 123 and/or from harvestable parts of a plant according to item 124.
   Item 126: Use of a nucleic acid encoding a UGE polypeptide enhancing yield-related traits preferably increased yield, more preferably increased seed yield relative to control plants.

[0740] According to a further embodiment of the present invention, there is also provided an isolated polypeptide comprising a polypeptide sequence selected from the group consisting of:

(i) an amino acid sequence encoded by any one of the nucleic acids represented by Item 116;
(ii) an amino acid sequence having, in increasing order of preference, at least 50%, 55%, 60%, 65%, 70%, 75%, 80%, 85%, 90%, 95%, 96%, 97%, 98%, 99% or more sequence identity to the amino acid sequence of (i);
(iii) derivatives of any of the amino acid sequences given in (i) or (ii) above.

### DESCRIPTION OF FIGURES

[0741] The present invention will now be described with reference to the following figures in which:

[0742] FIG. 1 represents the domain structure of SEQ ID NO: 2 with the conserved motifs indicated by underlining and their number. The HLH domain as determined by SMART is shown in bold underlined.

[0743] FIG. 2 represents a multiple alignment of a number of bHLH6-like proteins. A dot indicates conserved residues, a colon indicates highly conserved residues and an asterisk stands for perfectly conserved residues. The highest degree of sequence conservation is found in the region of the bHLH domain and in the more N-terminal part of the protein sequence

[0744] FIG. 3 represents the binary vector for increased expression in Oryza sativa of a bHLH6-like-encoding nucleic acid under the control of a rice GOS2 promoter (pGOS2)

[0745] FIG. 4 details examples of sequences useful in performing the methods according to the present invention.

[0746] FIG. 5 represents a CLUSTAL W (1; 83) multiple sequence alignment of RrmJ/FtsJ polypeptides from Table A2.

[0747] FIG. 6 represents the binary vector for increased expression in Oryza sativa of a GRP-encoding nucleic acid sequence (wherein said GRP polypeptide is an RrmJ/FtsJ polypeptide) under the control of a rice oleosin promoter (pOleo::GRP)

[0748] FIG. 7 details examples of sequences useful in performing the methods according to the present invention.

[0749] FIG. 8 represents the binary vector for increased expression in Oryza sativa of a GRP-encoding nucleic acid sequence (wherein said GRP polypeptide is a a basic-helix-loop-helix 4 (bHLH4) polypeptide) under the control of a rice HMGB promoter (pHMGB::GRP)

[0750] FIG. 9 details examples of sequences useful in performing the methods according to the present invention.

[0751] FIG. 10 represents a multiple sequence alignment of GRP-polypeptides (wherein said GRP polypeptide is a basic-helix-loop-helix 4 (bHLH4) polypeptide). A consensus sequence, domains and motifs representative of bHLH4-polypeptides are given. In the consensus sequence the highly conserved amino acids are provided; empty blank spaces in between represent any amino acid.

[0752] FIG. 11 represents the binary vector for increased expression in Oryza sativa of a GRP-encoding nucleic acid sequence (wherein said GRP polypeptide is an isopentenyl transferase (IPT) polypeptide under the control of a rice prolamine promoter (pProl::GRP)

[0753] FIG. 12 details examples of sequences useful in performing the methods according to the present invention.

[0754] FIG. 13 represents a multiple sequence alignment of GRP-polypeptides (wherein said GRP polypeptide is a isopentenyl transferase (IPT) polypeptide). A consensus sequence, domains and motifs representative of IPT-polypeptides are given. In the consensus sequence the highly conserved amino acids are provided; empty blank spaces in between represent any amino acid.

[0755] FIG. 14 represents the amino acid sequence and domain structure of SEQ ID NO: 169. The two conserved B-box domains in SEQ ID NO: 169 are indicated by dotted line (B-box domain 1) and by a continuous line (B-box domain 2). The four cysteine residues in each B-box domain with putative potential to bind zinc ions are indicated by boxes.

[0756] FIG. 15 represents a multiple sequence alignment of STO polypeptides. Position of the conserved amino acid residues and domains corresponding to those described in FIG. 14 are indicated. A consensus sequence representative of STO polypeptides is given. In the consensus sequence the highly conserved amino acids are provided; empty blank spaces in between represent any amino acid.

[0757] FIG. 16 shows phylogenetic tree of STO polypeptides. In the phylogenetic tree SEQ ID NO: 169 is represented by Os04g0540200.

[0758] FIG. 17 represents the binary vector for increased expression in Oryza sativa of an STO-encoding nucleic acid under the control of a rice GOS2 promoter (pGOS2)

[0759] FIG. 18 details examples of sequences useful in performing the methods according to the present invention.

[0760] FIG. 19 represents the amino acid sequence of SEQ ID NO: 225 wherein relevant functional domains and conserved motifs are indicated. Epimerase domain (boxed region), Motif 8 (capital letters in bold, underlined with an interrupted line), Motif 9 (small letters in bold), Motif 10 (capital letter in bold), Motif 11 (capital letters underlined by dots) and Motif 12 (capital letters underlined with a continuous line) are indicated.

[0761] FIG. 20 represents a multiple protein alignment of the UGE polypeptides of Table A6. A consensus sequences is given. Position of the conserved domain and motifs is indicated.

[0762] FIG. 21 shows a phylogenetic tree of the of the UGE polypeptides of Table A6.

[0763] FIG. 22 represents the binary vector for increased expression in Oryza sativa of a UGE-encoding nucleic acid under the control of a rice GOS2 promoter (pGOS2).

[0764] FIG. 23 details examples of sequences useful in performing the methods according to the present invention.

### EXAMPLES

[0765] The present invention will now be described with reference to the following examples, which are by way of illustration alone. The following examples are not intended to completely define or otherwise limit the scope of the invention.

[0766] DNA manipulation: unless otherwise stated, recombinant DNA techniques are performed according to standard protocols described in (Sambrook (2001) Molecular Cloning: a laboratory manual, 3rd Edition Cold Spring Harbor Laboratory Press, CSH, New York) or in Volumes 1 and 2 of Ausubel et al. (1994), Current Protocols in Molecular Biology, Current Protocols. Standard materials and methods for plant molecular work are described in Plant Molecular Biology Labfax (1993) by R. D. D. Croy, published by BIOS Scientific Publications Ltd (UK) and Blackwell Scientific Publications (UK).

### Example 1

### Identification of Sequences Related to the Nucleic Acid Sequence Used in the Methods of the Invention

[0767] Sequences (full length cDNA, ESTs or genomic) related to the nucleic acid sequence used in the methods of the present invention were identified amongst those maintained in the Entrez Nucleotides database at the National Center for Biotechnology Information (NCBI) using database sequence search tools, such as the Basic Local Alignment Tool (BLAST) (Altschul et al. (1990) J. Mol. Biol. 215:403-410; and Altschul et al. (1997) Nucleic Acids Res. 25:3389-3402). The program is used to find regions of local similarity between sequences by comparing nucleic acid or polypeptide sequences to sequence databases and by calculating the statistical significance of matches. For example, the polypeptide encoded by the nucleic acid used in the present invention was used for the TBLASTN algorithm, with default settings and the filter to ignore low complexity sequences set off. The output of the analysis was viewed by pairwise comparison, and ranked according to the probability score (E-value), where the score reflect the probability that a particular alignment occurs by chance (the lower the E-value, the more significant the hit). In addition to E-values, comparisons were also scored by percentage identity. Percentage identity refers to the number of identical nucleotides (or amino acids) between the two compared nucleic acid (or polypeptide) sequences over a particular length. In some instances, the default parameters may be adjusted to modify the stringency of the search. For example the E-value may be increased to show less stringent matches. This way, short nearly exact matches may be identified.

[0768] Table A provides a list of nucleic acid sequences related to the nucleic acid sequence used in the methods of the present invention.

TABLE A1
Examples of bHLH6-like polypeptides:

| | Nucleic acid | Protein |
|---|---|---|
| Plant Source | SEQ ID NO: | SEQ ID NO: |
| Arabidopsis thaliana | 1 | 2 |
| Phaseolus vulgaris | 13 | 14 |
| Catharanthus roseus | 15 | 16 |
| Solanum tuberosum | 17 | 18 |
| Pisum sativum | 19 | 20 |
| Brassica oleracea | 21 | 22 |
| Oryza sativa | 23 | 24 |
| Rheum australe | 25 | 26 |
| Zea mays | 27 | 28 |
| Physcomitrella patens | 29 | 30 |
| Lycopersicon esculentum | 31 | 32 |
| Populus trichocarpa | 33 | 34 |
| Triticum aestivum | 35 | 36 |
| Populus sp | 37 | 38 |
| Vitis vinifera | 39 | 40 |
| Oryza sativa | | 41 |

TABLE A2a
Examples of GRP polypeptides, wherein the GRP polypeptides are RrmJ/FtsJ
polypeptides:

| | | SEQ ID NO | SEQ ID NO | | Public database |
|---|---|---|---|---|---|
| | Source | nucleic acid | polypeptide | | accession |
| Name | organism | sequence | sequence | Status | number |
| Nicta_RrmJ/ | Nicotiana | 57 | 58 | Partial | |
| FtsJ partial | tabacum | | | | |
| Nicta_RrmJ/ | Nicotiana | 59 | 60 | Full | EB446219, |
| FtsJ | tabacum | | | length | EB448450.1 |
| Arath_RrmJ/ | Arabidopsis | 61 | 62 | Full | AY087952.1 |
| FtsJ | thaliana | | | length | |
| Lyces_RrmJ/ | Lycopersicon | 63 | 64 | Full | BT013964 |
| FtsJ | esculentum | | | length | |
| Medtr_RrmJ/ | Medicago | 65 | 66 | Full | AC149135.2 |
| FtsJ | truncatula | | | length | |
| Orysa_RrmJ/ | Oryza sativa | 67 | 68 | Full | AK103054 |
| FtsJ | | | | length | |
| Osta_RrmJ/FtsJ | Ostreococcus | 69 | 70 | Full | XM_001418019 |
| | lucimarinus | | | length | |
| | CCE9901 | | | | |
| Poptr_RrmJ/ | Populus | 71 | 72 | Full | contig of |
| FtsJ | tremuloides | | | length | CX183550.1 |
| | | | | | DT504907.1 |
| Sacof_RrmJ/ | Saccharum | 73 | 74 | Full | contig of |
| FtsJ | officinarum | | | length | CA279558.1 |
| | | | | | CF576902.1 |
| Triae_RrmJ/ | Triticum aestivum | 75 | 76 | Full | DR740715 |
| FtsJ | | | | length | |
| Apime_RrmJ/ | Apis mellifera | 77 | 78 | Full | XM_392223 |
| FtsJ | | | | length | |
| Caeel_RrmJ/ | Caenorhabditis | 79 | 80 | Full | NM_065442 |
| FtsJ | elegans | | | length | |
| Danre_RrmJ/ | Danio rerio | 81 | 82 | Full | BC085449 |
| FtsJ | | | | length | |
| Homsa_RrmJ/ | Homo sapiens | 83 | 84 | Full | AK024023 |
| FtsJ | | | | length | |
| Horvu_FtsJ | Hordeum vulgare | 92 | 93 | Full | |
| | | | | length | |
| Sorbi_FtsJ | Sorghum bicolor | 94 | 95 | Full | |
| | | | | length | |

TABLE A2b
Examples of GRP polypeptides, wherein the GRP polypeptides are
RrmJ/FtsJ polypeptides:

| | | SEQ ID NO | SEQ ID NO | |
|---|---|---|---|---|
| | Source | nucleic acid | polypeptide | |
| Name | organism | sequence | sequence | Status |
| Brana_FtsJ | Brassica | 96 | 97 | Full length |
| | napus | | | |
| Glyma_FtsJ | Glycine | 98 | 99 | Full length |
| | max | | | |
| Zeama_FtsJ | Zea mays | 100 | 101 | Full length |
| Tager_FtsJ_partial | Tagetes | | | Partial |
| | erecta | | | |

TABLE A3a
Examples of GRP polypeptides, wherein the GRP polypeptides are bHLH4
polypeptides:

| | | SEQ ID | SEQ ID NO | |
|---|---|---|---|---|
| | | NO nucleic acid | polypeptide | Public database |
| Name | Source organism | sequence | sequence | accession number |
| Arath_bHLH4 | Arabidopsis | 104 | 105 | |
| | thaliana | | | |
| Arath_bHLH4 | Arabidopsis | 109 | 110 | |
| II | thaliana | | | |
| Brana_bHLH4 | Brassica napus | 111 | 112 | |
| II | | | | |
| Lotja_bHLH4 | Lotus japonicus | 113 | 114 | |
| Lyces_bHLH4 | Lycopersicon | 115 | 116 | |
| | esculentum | | | |
| Vitvi_bHLH4 | Vitis vinifera | 117 | 118 | contig like |
| | | | | VV78X118066.5 |
| | | | | AM475703.2 |
| Zeama_bHLH4 | Zea mays | 119 | 120 | full length nucleic |
| | | | | acid sequence |
| | | | | contig of |
| | | | | AF061107 and |
| | | | | EE190449 |

TABLE A3b
Examples of GRP polypeptides, wherein the GRP polypeptides are
bHLH4 polypeptides:

| | | | | Public |
|---|---|---|---|---|
| | | SEQ ID NO | SEQ ID NO | database |
| | Source | nucleic acid | polypeptide | accession |
| Name | organism | sequence | sequence | number |
| Brana_bHLH4 | Brassica | 121 | 122 | |
| | napus | | | |
| Glyma_bHLH4 | Glycine max | 123 | 124 | |
| Glyma_bHLH4 | Glycine max | 125 | 126 | |
| II | | | | |
| Horvu_bHLH4 | Hordeum | 127 | 128 | |
| | vulgare | | | |
| Zeama_bHLH4 | Zea mays | 129 | 130 | |
| II | | | | |

TABLE A4
Examples of GRP polypeptides, wherein the GRP polypeptides are IPT
polypeptides:

| | | SEQ ID NO | SEQ ID NO |
|---|---|---|---|
| | Source | nucleic acid | polypeptide |
| Name | organism | sequence | sequence |
| Arath_IPT | Arabidopsis | 131 | 132 |
| | thaliana | | |
| Arath_IPT4 | Arabidopsis | 136 | 137 |
| | thaliana | | |
| Arath_IPT6 | Arabidopsis | 138 | 139 |
| | thaliana | | |
| Humlu_IPT | Humulus lupunus | 140 | 141 |
| like | | | |
| Lotja_IPT | Lotus japonica | 142 | 143 |
| like | | | |
| Medtr_IPT | Medicago | 144 | 145 |
| like | truncatula | | |
| Moral_IPT | Morus alba | 146 | 147 |
| like | | | |
| Orysa_IPT | Oryza sativa | 148 | 149 |
| like | | | |
| Pethy_IPT | Petunia hybrida | 150 | 151 |
| like | | | |
| Poptr_IPT | Populus | 152 | 153 |
| like | tremuloides | | |
| Poptr_IPT | Populus | 154 | 155 |
| like II | tremuloides | | |
| Poptr_IPT | Populus | 156 | 157 |
| like III | tremuloides | | |
| Poptr_IPT | Populus | 158 | 159 |
| like IV | tremuloides | | |
| Poptr_IPT | Populus | 160 | 161 |
| like V | tremuloides | | |
| Poptr_IPT | Populus | 162 | 163 |
| like VI | tremuloides | | |
| Vitvi_IPT like | Vitis vinifera | 164 | 165 |
| Zeama_IPT | Zea mays | 166 | 167 |
| like | | | |

TABLE A5a
Examples of STO nucleic acids a and polypeptides:

| | | Nucleic acid | Protein |
|---|---|---|---|
| Name | Plant Source | SEQ ID NO: | SEQ ID NO: |
| Os04g0540200 | Oryza sativa | 168 | 169 |
| cds3887 | | | |
| Os01g0202500 | Oryza sativa | 170 | 171 |
| Os02g0606200 | Oryza sativa | 172 | 173 |
| Os02g0646200 | Oryza sativa | 174 | 175 |
| Os04g049300 | Oryza sativa | 176 | 177 |
| Os05g0204600 | Oryza sativa | 178 | 179 |
| Os06g0152200 | Oryza sativa | 180 | 181 |
| Os06g071300 | Oryza sativa | 182 | 183 |
| Os09g0527900 | Oryza sativa | 184 | 185 |
| Os12g0209200 | Oryza sativa | 186 | 187 |
| SO_STO | Saccharum officinarum | 188 | 189 |
| AT1G06040_spliced variant1 | Arabidopsis thaliana | 190 | 191 |
| AT1G06040_spliced variant2 | Arabidopsis thaliana | 192 | 193 |
| AT1G75540 | Arabidopsis thaliana | 194 | 195 |
| AT1G78600 | Arabidopsis thaliana | 196 | 197 |
| AT2G31380 | Arabidopsis thaliana | 198 | 199 |
| AT4G10240 | Arabidopsis thaliana | 200 | 201 |
| AT4G39070 | Arabidopsis thaliana | 202 | 203 |
| Mt_ABO84497 | Medicago truncatula | 204 | 205 |
| LE_gi\|45544865 | Lycopersicul esculentum | 206 | 207 |
| ST_gi\|76160970 | Solanum tuberosum | 208 | 209 |
| PP_STO LIKE | populus trichoparcca | 210 | 211 |
| VV_CAN72879 | Vitis vinifera | 212 | 213 |
| GM_gi\|78173056 | Glycine max | 214 | 215 |

TABLE A5b
Examples of STO nucleic acids and polypeptides:

| | | Nucleic acid | Protein SEQ |
|---|---|---|---|
| Name | Plant Source | SEQ ID NO: | ID NO: |
| Zeama_STO | Zea mays | 222 | 223 |

TABLE A6
Examples of UGE nucleic acids and polypeptides:

| | | Nucleic | Protein |
|---|---|---|---|
| | | acid | SEQ |
| Name | Source organism | SEQ ID NO: | ID NO: |
| OS_UGE2 | Oryza sativa | 224 | 225 |
| Os04g0618200 | Oryza sativa | 226 | 227 |
| Os05g0595100 | Oryza sativa | 228 | 229 |
| Os07g0139400 | Oryza sativa | 230 | 231 |
| Os08g0374800 | Oryza sativa | 232 | 233 |
| Os09g0323000 | Oryza sativa | 234 | 235 |
| Os09g0504000 | Oryza sativa | 236 | 237 |
| Os09g0526700 | Oryza sativa | 238 | 239 |
| AT1G12780_UGE1 | Arabidopsis thaliana | 240 | 241 |
| AT1G63180_UGE3 | Arabidopsis thaliana | 242 | 243 |
| AT1G64440_UGE4 | Arabidopsis thaliana | 244 | 245 |
| AT4G10960_UGE5 | Arabidopsis thaliana | 246 | 247 |
| AT4G23920_UGE2 | Arabidopsis thaliana | 248 | 249 |
| Pt_lcl\|scaff_XVI.140 | Populus trichocarpa | 250 | 251 |
| Pt_lcl\|scaff_XI.1329 | Populus trichocarpa | 252 | 253 |
| Pt_lcl\|scaff_VI.203 | Populus trichocarpa | 254 | 255 |
| Pt_lcl\|scaff_III.961 | Populus trichocarpa | 256 | 257 |
| Pt_lcl\|scaff_III.1133 | Populus trichocarpa | 258 | 259 |
| Pt_lcl\|scaff_I.773 | Populus trichocarpa | 260 | 261 |
| Pt_lcl\|scaff_I.2996 | Populus trichocarpa | 262 | 263 |
| Pt_lcl\|scaff_5422 | Populus trichocarpa | 264 | 265 |
| Ot08g015500 | Ostreococcus tauri | 266 | 267 |
| SC_GAL10_P04397 | Ostreococcus tauri | 268 | 269 |
| Ec_GALE_AAO37702 | Escherichia coli | 270 | 271 |

TABLE A6b
Examples of UGE nucleic acids and polypeptides:

| | | Nucleic acid | Protein SEQ |
|---|---|---|---|
| Name | Source organism | SEQ ID NO: | ID NO: |
| Brana_UGE I | Brassica napus | 281 | 282 |
| Brana_UGE II | Brassica napus | 283 | 284 |
| Zeama_UGE I | Zea mays | 285 | 286 |
| Zeama_UGE II | Zea mays | 287 | 288 |
| Zeama_UGE III | Zea mays | 289 | 290 |
| Zeama_UGE IV | Zea mays | 291 | 292 |
| Zeama_UGE V | Zea mays | 293 | 294 |
| Zeama_UGE VI | Zea mays | 295 | 296 |
| Zeama_UGE VII | Zea mays | 297 | 298 |
| Zeama_UGE VIII | Zea mays | 299 | 300 |
| Orysa_UGE | Oryza sativa | 301 | 302 |
| Glyma_UGE I | Glycine max | 303 | 304 |
| Glyma_UGE II | Glycine max | 305 | 306 |
| Glyma_UGE III | Glycine max | 307 | 308 |
| Glyma_UGE IV | Glycine max | 309 | 310 |
| Glyma_UGE V | Glycine max | 311 | 312 |
| Helan_UGE | Helianthus annuus | 313 | 314 |
| Zeama_UGE IX | Zea mays | 315 | 316 |
| Zeama_UGE X | Zea mays | 317 | 318 |
| Glyma_UGE VI | Glycine max | 319 | 320 |

[0769] In addition, in some instances, related sequences have tentatively been assembled and publicly disclosed by research institutions, such as The Institute for Genomic Research (TIGR). The Eukaryotic Gene Orthologs (EGO) database may be used to identify such related sequences, either by keyword search or by using the BLAST algorithm with the nucleic acid or polypeptide sequence of interest. Some of the listed sequences are partial; preferably full length sequences or functionally equivalent fragments are used in the methods of the present invention. Where only partial sequences are available from the databases, standard cloning techniques can be used by the skilled in the art for obtaining a full length gene sequence.

### Example 2

### Alignment of Polypeptide Sequences of the Invention

[0770] Alignment of polypeptide sequences was performed using the AlignX programme from the Vector NTI (Invitrogen) which is based on the popular Clustal W algorithm of progressive alignment (Thompson et al. (1997) Nucleic Acids Res 25:4876-4882; Chenna et al. (2003). Nucleic Acids Res 31:3497-3500). Default values were for the gap open penalty of 10, for the gap extension penalty of 0,1 and the selected weight matrix was Blosum 62 (if polypeptides are aligned). Minor manual editing was done to further optimise the alignment.

Alignment of bHLH6-Like Polypeptide Sequences

[0771] Sequence conservation among bHLH6-like polypeptides is essentially in the N-terminal domain and the C-terminal bHLH domain of the polypeptides, the central part usually being more variable in sequence length and composition. The bHLH6-like polypeptides are aligned in FIG. 2.

### Alignment of RrmJ/FtsJ Polypeptide Sequences

[0772] A CLUSTAL W (1; 83) multiple sequence alignment of RrmJ/FtsJ polypeptides from Table A2 is shown in FIG. 5.

[0773] A consensus sequence of bHLH4 polypeptides comprising highly conserved representative amino acids at each position is given; blanks in between given amino acids in the consensus sequence represent any amino acid.

[0774] The bHLH4 polypeptides are aligned in FIG. 10.

[0775] Sequence conservation among bHLH4 polypeptides was found essentially along the bHLH domain. The consensus sequence represents highly conserved amino acid residues in bHLH4 polypeptides; blanks in the consensus sequence represent highly variable regions.

### Alignment of IPT Polypeptide Sequences

[0776] A consensus sequence of IPT polypeptides comprising highly conserved representative amino acids at each position is given; blanks in between given amino acids in the consensus sequence represent any amino acid.

[0777] The IPT polypeptides are aligned in FIG. 13.

[0778] The consensus sequence represents highly conserved amino acid residues in IPT polypeptides; blanks in the consensus sequence represent highly variable regions.

[0779] A phylogenetic tree of GRP polypeptides is constructed using a neighbour-joining clustering algorithm as provided in the AlignX programme from Vector NTI (Invitrogen).

[0780] Sequence conservation among STO polypeptides is essentially in the N-terminal region comprising the two B-box domains. The two B-box domains are separated by a linker region of variable length, typically between 2 and 20 amino acids.

[0781] A phylogenetic tree of STO polypeptides (FIG. 16) was constructed using a neighbour-joining clustering algorithm as provided in the AlignX programme from the Vector NTI (Invitrogen).

[0782] A consensus sequence of UGE polypeptides comprising highly conserved representative amino acids at each position is given; blanks in between given amino acids in the consensus sequence represent any amino acid.

[0783] The UGE polypeptides are aligned in FIG. 20.

[0784] Sequence conservation among UGE polypeptides is higher in the region located at the N-terminal of the epimerase domain. Regions wherein in the consensus sequence there are defined amino acids given represent the regions with high similarity; blanks in the consensus sequence represent highly variable regions.

[0785] A phylogenetic tree of UGE polypeptides (FIG. 21) was constructed using a neighbour-joining clustering algorithm as provided in the AlignX programme from the Vector NTI (Invitrogen).

### Example 3

### Calculation of Global Percentage Identity Between Polypeptide Sequences Useful in Performing the Methods of the Invention

[0786] Global percentages of similarity and identity between full length polypeptide sequences useful in performing the methods of the invention were determined using one of the methods available in the art, the MatGAT (Matrix Global Alignment Tool) software (BMC Bioinformatics. 2003 4:29. MatGAT: an application that generates similarity/identity matrices using protein or DNA sequences. Campanella J J, Bitincka L, Smalley J; software hosted by Ledion Bitincka). MatGAT software generates similarity/identity matrices for DNA or protein sequences without needing pre-alignment of the data. The program performs a series of pair-wise alignments using the Myers and Miller global alignment algorithm (with a gap opening penalty of 12, and a gap extension penalty of 2), calculates similarity and identity using for example Blosum 62 (for polypeptides), and then places the results in a distance matrix. Sequence similarity is shown in the bottom half of the dividing line and sequence identity is shown in the top half of the diagonal dividing line.

[0787] Parameters used in the comparison were:

| Scoring matrix: | Blosum62 |
|---|---|
| First Gap: | 12 |
| Extending gap: | 2 |

[0788] Results of the software analysis are shown in Table B1 for the global similarity and identity over the full length of the polypeptide sequences. Percentage identity is given above the diagonal in bold and percentage similarity is given below the diagonal (normal face).

[0789] The percentage identity between the bHLH6-like polypeptide sequences useful in performing the methods of the invention can be as low as 30% amino acid identity compared to SEQ ID NO: 2 (AAL55713). However, when the alignment is made over the bHLH domain, the sequence identity becomes much higher among the different bHLH6-like proteins. In Table B2, values for the global similarity and identity between sequences that align with SEQ ID NO: 9, (comprising the bHLH domains of bHLH6-like polypeptide sequences) are listed. The sequence identity is about 80% or higher. The used peptide sequences are: SEQ ID NO: 42, NP_{—}001065478; SEQ ID NO: 43, EAY79619; SEQ ID NO: 44, AAD15818; SEQ ID NO: 45, AAB00686; SEQ ID NO: 46, ABD59338; SEQ ID NO: 47, Pt29.195#1; SEQ ID NO: 48, CAF74710; SEQ ID NO: 49, AAF04917; SEQ ID NO: 50, AAQ14332; SEQ ID NO: 51, AAY90122; SEQ ID NO: 52, AAL55713; SEQ ID NO: 53, ABD65632; SEQ ID NO: 54, ABK94979; SEQ ID NO: 55, EDQ81347.

TABLE B1
MatGAT results for global similarity and identity over the full length of the
polypeptide sequences.

| | 1 | 2 | 3 | 4 | 5 | 6 | 7 | 8 | 9 | 10 | 11 | 12 | 13 | 14 |
|---|---|---|---|---|---|---|---|---|---|---|---|---|---|---|
| 1. AAB00686 | | 66.5 | 59.1 | 56.6 | 58.3 | 28.2 | 49.1 | 48.4 | 48.0 | 43.7 | 47.8 | 31.9 | 30.5 | 62.6 |
| 2. ABD59338 | 79.1 | | 54.1 | 50.1 | 55.1 | 27.9 | 46.6 | 43.8 | 45.8 | 41.7 | 45.5 | 29.5 | 31.7 | 57.4 |
| 3. AAQ14332 | 71.1 | 67.7 | | 53.5 | 64.0 | 28.8 | 52.1 | 45.4 | 47.8 | 43.6 | 46.2 | 29.3 | 30.6 | 60.5 |
| 4. AAL55713 | 70.7 | 68.3 | 67.2 | | 52.0 | 24.7 | 46.3 | 47.6 | 47.2 | 42.6 | 45.8 | 33.6 | 33.2 | 55.4 |
| 5. CAF74710 | 70.2 | 68.8 | 78.4 | 66.8 | | 37.3 | 52.9 | 46.4 | 49.7 | 45.5 | 49.2 | 30.0 | 30.0 | 60.5 |
| 6. AAF04917 | 34.9 | 34.4 | 35.1 | 32.4 | 40.9 | | 26.0 | 27.8 | 23.3 | 24.4 | 24.2 | 23.2 | 20.7 | 29.5 |
| 7. AAY90122 | 63.6 | 62.1 | 68.1 | 59.6 | 67.6 | 30.7 | | 41.1 | 45.1 | 42.4 | 44.2 | 27.0 | 29.8 | 49.7 |
| 8. ABD65632 | 66.8 | 61.8 | 60.2 | 66.8 | 59.1 | 34.3 | 54.2 | | 39.3 | 36.8 | 40.0 | 33.5 | 32.2 | 49.2 |
| 9. NP001065478 | 63.8 | 63.5 | 64.8 | 60.8 | 65.5 | 30.9 | 61.4 | 53.5 | | 94.7 | 79.2 | 28.7 | 29.9 | 48.3 |
| 10. EAY79619 | 62.0 | 61.2 | 59.8 | 58.7 | 61.4 | 32.3 | 57.9 | 52.6 | 94.8 | | 75.3 | 27.9 | 27.9 | 43.2 |
| 11. AAD15818 | 62.3 | 62.4 | 63.4 | 59.0 | 65.7 | 31.1 | 62.1 | 54.1 | 87.6 | 83.3 | | 28.5 | 31.1 | 47.0 |
| 12. ABK94979 | 48.6 | 45.4 | 45.2 | 52.6 | 44.9 | 35.8 | 42.6 | 52.2 | 42.9 | 42.8 | 42.7 | | 27.3 | 30.4 |
| 13. EDQ81347 | 50.3 | 49.4 | 47.1 | 50.6 | 48.7 | 31.4 | 46.7 | 53.2 | 45.9 | 44.6 | 45.6 | 48.1 | | 32.2 |
| 14. Pt29.195#1 | 76.8 | 72.6 | 74.5 | 71.6 | 73.4 | 36.9 | 64.0 | 66.2 | 63.7 | 61.5 | 61.8 | 47.9 | 48.8 | |

TABLE B2
MatGAT results for global similarity and identity over the peptide sequences
corresponding to Motif 7.

| | 1 | 2 | 3 | 4 | 5 | 6 | 7 | 8 | 9 | 10 | 11 | 12 | 13 | 14 |
|---|---|---|---|---|---|---|---|---|---|---|---|---|---|---|
| 1. AAL55713 | | 88.6 | 88.6 | 88.6 | 90.0 | 90.0 | 87.1 | 92.9 | 90.0 | 91.4 | 90.0 | 90.0 | 81.4 | 82.9 |
| 2. NP_001065478 | 94.3 | | 100.0 | 98.6 | 92.9 | 94.3 | 92.9 | 92.9 | 90.0 | 92.9 | 91.4 | 91.4 | 80.0 | 84.3 |
| 3. EAY79619 | 94.3 | 100.0 | | 98.6 | 92.9 | 94.3 | 92.9 | 92.9 | 90.0 | 92.9 | 91.4 | 91.4 | 80.0 | 84.3 |
| 4. AAD15818 | 94.3 | 100.0 | 100.0 | | 92.9 | 94.3 | 94.3 | 92.9 | 90.0 | 92.9 | 91.4 | 91.4 | 80.0 | 84.3 |
| 5. AAB00686 | 95.7 | 95.7 | 95.7 | 95.7 | | 94.3 | 90.0 | 94.3 | 91.4 | 92.9 | 92.9 | 91.4 | 84.3 | 82.9 |
| 6. ABD59338 | 94.3 | 95.7 | 95.7 | 95.7 | 94.3 | | 92.9 | 95.7 | 92.9 | 95.7 | 94.3 | 94.3 | 81.4 | 85.7 |
| 7. Pt29.195#1 | 95.7 | 95.7 | 95.7 | 95.7 | 94.3 | 95.7 | | 92.9 | 90.0 | 92.9 | 91.4 | 92.9 | 77.1 | 85.7 |
| 8. CAF74710 | 97.1 | 94.3 | 94.3 | 95.7 | 94.3 | 95.7 | 98.6 | | 97.1 | 97.1 | 97.1 | 94.3 | 80.0 | 85.7 |
| 9. AAF04917 | 97.1 | 94.3 | 94.3 | 95.7 | 94.3 | 95.7 | 98.6 | 100.0 | | 94.3 | 94.3 | 94.3 | 77.1 | 82.9 |
| 10. AAQ14332 | 97.1 | 94.3 | 94.3 | 95.7 | 94.3 | 95.7 | 97.1 | 98.6 | 98.6 | | 94.3 | 95.7 | 81.4 | 85.7 |
| 11. AAY90122 | 95.7 | 95.7 | 95.7 | 97.1 | 95.7 | 97.1 | 98.6 | 98.6 | 98.6 | 97.1 | | 92.9 | 78.6 | 84.3 |
| 12. ABD65632 | 97.1 | 94.3 | 94.3 | 94.3 | 95.7 | 95.7 | 97.1 | 97.1 | 97.1 | 97.1 | 97.1 | | 80.0 | 87.1 |
| 13. ABK94979 | 90.0 | 88.6 | 88.6 | 88.6 | 92.9 | 88.6 | 87.1 | 88.6 | 88.6 | 88.6 | 90.0 | 90.0 | | 71.4 |
| 14. EDQ81347 | 91.4 | 91.4 | 91.4 | 91.4 | 91.4 | 92.9 | 94.3 | 92.9 | 92.9 | 92.9 | 92.9 | 95.7 | 87.1 | |

[0790] The percentage identity between the STO polypeptide sequences useful in performing the methods of the invention can be as low as 15% amino acid identity compared to SEQ ID NO: 2 (Os04g0540200)

TABLE B3
MatGAT results for global similarity and identity over the full length of the
polypeptide sequence amongst rice STO proteins.

| | 1 | 2 | 3 | 4 | 5 | 6 | 7 | 8 | 9 | 10 |
|---|---|---|---|---|---|---|---|---|---|---|
| 1. Os04g0540200 | | 29.4 | 32.3 | 63.1 | 33.8 | 28 | 29.2 | 39.3 | 28 | 37.2 |
| 2. Os01g0202500 | 39.5 | | 27.1 | 27.4 | 26.5 | 50.1 | 39.1 | 28.6 | 17.9 | 30.9 |
| 3. Os02g0606200 | 49.1 | 38.4 | | 30.3 | 61.2 | 26.4 | 29.6 | 31.8 | 26.6 | 29.6 |
| 4. Os02g0646200 | 71.7 | 39.8 | 45.8 | | 30.5 | 27 | 29.1 | 41.1 | 25.3 | 33.3 |
| 5. Os04g0493000 | 48.2 | 37.5 | 71.6 | 43.9 | | 28.2 | 30.4 | 34.6 | 25.7 | 31.7 |
| 6. Os05g0204600 | 36.2 | 63 | 36.2 | 36 | 36 | | 37.9 | 26.2 | 17.6 | 29.4 |
| 7. Os06g0152200 | 40 | 54.4 | 42.5 | 39.2 | 40.3 | 54.2 | | 28.8 | 21.1 | 28 |
| 8. Os06g0713000 | 52.3 | 39.8 | 43.8 | 51.9 | 45.5 | 37 | 41.4 | | 21.4 | 29.9 |
| 9. Os09g0527900 | 39.2 | 27.5 | 34.3 | 35.3 | 41.6 | 25.7 | 30.3 | 32.5 | | 25.1 |
| 10. Os12g0209200 | 46.8 | 37.8 | 42.4 | 44.6 | 43.6 | 34.1 | 36.1 | 38.6 | 38.4 | |

TABLE B4
MatGAT results for global similarity and identity over the full length of the
polypeptide sequence amongst orthologous sequences to SEQ IC NO: 2

| | 1 | 2 | 3 | 4 | 5 | 6 | 7 | 8 | 9 | 10 | 11 | 12 | 13 |
|---|---|---|---|---|---|---|---|---|---|---|---|---|---|
| 1. AT1G06040_SplicedVariant1 | | 68.5 | 29.5 | 32 | 69.2 | 29.1 | 31.5 | 31.6 | 58.9 | 59.7 | 32.3 | 30 | 62.5 |
| 2. AT1G06040_SplicedVariant2 | 69 | | 26.2 | 30.1 | 47.4 | 38.3 | 30.6 | 32.9 | 49.4 | 49.8 | 30 | 39.3 | 48.6 |
| 3. AT1G75540 | 43.2 | 35.6 | | 29.5 | 28.4 | 23.4 | 35.6 | 32.3 | 30.5 | 30.2 | 51.5 | 25.5 | 29 |
| 4. AT1G78600 | 48.2 | 40.1 | 45.9 | | 32.1 | 28.2 | 29.7 | 28.9 | 32.1 | 32.1 | 30.9 | 30.5 | 30.6 |
| 5. AT2G31380 | 82.7 | 60.9 | 40.5 | 44.5 | | 29.5 | 34.6 | 32.6 | 58.2 | 58.2 | 32.2 | 29.6 | 58.3 |
| 6. AT4G10240 | 41.9 | 57.6 | 32.9 | 36.5 | 42 | | 30 | 31 | 31.4 | 29.3 | 23.8 | 39.9 | 30.3 |
| 7. AT4G39070 | 50.4 | 43 | 47.7 | 43.5 | 48.3 | 40.9 | | 46.8 | 30 | 30.4 | 38.7 | 29.6 | 30.9 |
| 8. MS_ABO84497 | 49.2 | 49.1 | 46.5 | 41.8 | 49.2 | 44.6 | 60.7 | | 32.6 | 30.8 | 37.5 | 35.1 | 30.6 |
| 9. LE_AAS67368 | 69.4 | 57.1 | 41.4 | 45.2 | 70.6 | 45.9 | 47.1 | 51.9 | | 98.3 | 33.4 | 33.2 | 65.8 |
| 10. ST_ABA40448.1 | 69.8 | 57.1 | 40.8 | 45.5 | 71 | 45.1 | 47.1 | 48.5 | 99.1 | | 33.1 | 32.8 | 66.7 |
| 11. PP_STO | 43.5 | 37.1 | 65.3 | 43.5 | 42.6 | 33.9 | 50.3 | 53.2 | 46.1 | 46.1 | | 27.3 | 30.8 |
| 12. VV-CAN72879.1 | 45.6 | 53.2 | 35.6 | 45.2 | 49.2 | 54.6 | 44.2 | 47.3 | 49.8 | 48.9 | 37.1 | | 30.9 |
| 13. GM_ABB29467 | 74.6 | 57.1 | 40.2 | 44.1 | 73.5 | 43.7 | 45 | 50 | 76.5 | 76.5 | 42.3 | 45.4 | |

[0791] The percentage identity between the UGE polypeptide sequences useful in performing the methods of the invention can be as low as 15% amino acid identity compared to SEQ ID NO: 222.

TABLE B5
MatGAT results for global similarity and identity over the full length of the
polypeptide sequences representing UGE isoforms in rice.

| UGE protein Name | 1 | 2 | 3 | 4 | 5 | 6 | 7 | 8 |
|---|---|---|---|---|---|---|---|---|
| 1. Os04g0618200 | | 36.7 | 74.3 | 35.9 | 37 | 21.4 | 36.5 | 36.7 |
| 2. Os05g0595100 | 51.7 | | 36.2 | 65.8 | 72.2 | 21.1 | 58.6 | 99.7 |
| 3. Os07g0139400 | 81.7 | 50.6 | | 34.7 | 34.8 | 21.5 | 33.7 | 36 |
| 4. Os08g0374800 | 51 | 75.7 | 50.6 | | 74.4 | 21.7 | 53.4 | 65.8 |
| 5. Os09g0323000 | 51.9 | 82.4 | 49.6 | 82.1 | | 22.6 | 56.3 | 72.8 |
| 6. Os09g0504000 | 36.7 | 33.1 | 38.8 | 34.5 | 35.7 | | 21.4 | 21.6 |
| 7. Os09g0526700 | 51.4 | 74 | 48.2 | 67.6 | 72.9 | 34.5 | | 58.6 |
| 8. OS_UGE2 | 51.7 | 100 | 50.6 | 75.5 | 82.9 | 33.5 | 73.5 | |

TABLE B6
MatGAT results for global similarity and identity over the full length of the
polypeptide sequences representing UGE isoforms originating form different organisms.

| UGE protein Name | 1 | 2 | 3 | 4 | 5 | 6 | 7 | 8 | 9 |
|---|---|---|---|---|---|---|---|---|---|
| 1. AT1G12780_UGE | | 90.6 | 63.3 | 64.6 | 64.3 | 33.9 | 33.1 | 32.9 | 43.6 |
| 2. AT1G63180_UGE | 95.4 | | 62.1 | 63.8 | 63.5 | 32.7 | 31.8 | 32.1 | 42.7 |
| 3. AT1G64440_UGE | 78.3 | 77.5 | | 79.2 | 79.4 | 37.6 | 34.6 | 34.2 | 32.3 |
| 4. AT4G10960_UGE | 81.5 | 80.1 | 88 | | 88.3 | 37.4 | 34.9 | 34.6 | 31 |
| 5. AT4G23920_UGE | 80.1 | 77.8 | 88 | 92.9 | | 37.1 | 35.3 | 34.8 | 31.3 |
| 6. Pt_lcl\|scaff_XVI.140 | 53.2 | 51.3 | 55 | 54.5 | 54 | | 75.3 | 82.7 | 21.1 |
| 7. Pt_lcl\|scaff_XI.1329 | 49.4 | 47.5 | 51.1 | 49.2 | 49.2 | 81.5 | | 76.2 | 18.9 |
| 8. Pt_lcl\|scaff_VI.203 | 49.5 | 48 | 50 | 50.2 | 48.8 | 87.6 | 85.9 | | 20.4 |
| 9. Pt_lcl\|scaff_III.961 | 47.9 | 46.4 | 42 | 41.9 | 42.6 | 33.3 | 30.9 | 31.7 | |
| 10. Pt_lcl\|scaff_III.1133 | 79.8 | 78.3 | 88.2 | 90.3 | 90.3 | 52.9 | 48.7 | 47.8 | 43.4 |
| 11. Pt_lcl\|scaff_I.773 | 69.2 | 68.7 | 76.1 | 76.1 | 77.4 | 49.2 | 44.1 | 45.9 | 41.9 |
| 12. Pt_lcl\|scaff_I.2996 | 49.4 | 47.5 | 50.8 | 49.4 | 48.9 | 80.6 | 97.1 | 85.1 | 30.9 |
| 13. Pt_lcl\|scaff_5422 | 45 | 44.5 | 45.8 | 48.1 | 47.3 | 39.3 | 38.4 | 39.5 | 25 |
| 14. Ot08g015500 | 34.9 | 34.5 | 35.5 | 37.1 | 36.8 | 28.9 | 29.8 | 29.8 | 20 |
| 15. SC_GAL10_P04397 | 77.8 | 76.4 | 73.6 | 75.6 | 75.3 | 52.1 | 47 | 47.3 | 40.9 |
| 16. Ec_GALE_AAO37702 | 67.5 | 67.8 | 65.5 | 66.7 | 67.4 | 51.1 | 46.5 | 46.1 | 39.5 |
| 17. OS_UGE2 | 80.2 | 79.9 | 83.9 | 87.3 | 86.7 | 55.6 | 50.6 | 50.2 | 42.1 |

| UGE protein Name | 10 | 11 | 12 | 13 | 14 | 15 | 16 | 17 |
|---|---|---|---|---|---|---|---|---|
| 1. AT1G12780_UGE | 65.8 | 54.3 | 33.1 | 33.5 | 24.5 | 59.6 | 47.7 | 65.1 |
| 2. AT1G63180_UGE | 65.5 | 53.7 | 32 | 33.1 | 24 | 60.1 | 49.1 | 65.4 |
| 3. AT1G64440_UGE | 79.6 | 64.6 | 34.4 | 33.9 | 26.9 | 59.9 | 49.3 | 74.9 |
| 4. AT4G10960_UGE | 81.2 | 64.6 | 34.7 | 35.9 | 28.3 | 64.2 | 50.3 | 76.4 |
| 5. AT4G23920_UGE | 83.1 | 65.9 | 35.3 | 35.6 | 28.5 | 62.4 | 50.4 | 75.8 |
| 6. Pt_lcl\|scaff_XVI.140 | 36.8 | 32.9 | 73.2 | 22.5 | 19.6 | 36.1 | 35.2 | 36.1 |
| 7. Pt_lcl\|scaff_XI.1329 | 34.7 | 31 | 94.5 | 21.1 | 19.9 | 33.3 | 33.1 | 34.3 |
| 8. Pt_lcl\|scaff_VI.203 | 34.9 | 32.2 | 75.5 | 22 | 19.4 | 34.2 | 33 | 34.3 |
| 9. Pt_lcl\|scaff_III.961 | 33.1 | 29.9 | 19.6 | 18.2 | 15.2 | 30 | 25.4 | 31.8 |
| 10. Pt_lcl\|scaff_III.1133 | | 73.1 | 34.4 | 34.7 | 27.2 | 62.5 | 50 | 78.2 |
| 11. Pt_lcl\|scaff_I.773 | 80.5 | | 30.8 | 28.6 | 23.7 | 52 | 41.8 | 62.5 |
| 12. Pt_lcl\|scaff_I.2996 | 48.2 | 44.1 | | 20.8 | 19.4 | 33.3 | 32.4 | 34 |
| 13. Pt_lcl\|scaff_5422 | 46.4 | 40.1 | 38.2 | | 32.5 | 35.5 | 32.9 | 35 |
| 14. Ot08g015500 | 36.3 | 32.2 | 29.8 | 45.8 | | 26.2 | 24.5 | 26.9 |
| 15. SC_GAL10_P04397 | 73.9 | 65.1 | 47.2 | 48.7 | 34.6 | | 47.3 | 61.7 |
| 16. Ec_GALE_AAO37702 | 67.5 | 61.9 | 46.3 | 44.5 | 34.2 | 63.6 | | 50 |
| 17. OS_UGE2 | 87.6 | 74.3 | 50.4 | 45 | 37.5 | 73.2 | 67.8 | |

[0792] A MATGAT table for local alignment of a specific domain, or data on % identity/similarity between specific domains may also be generated for the other polypeptides (or part thereof) of the invention.

### Example 4

### Identification of Domains Comprised in Polypeptide Sequences Useful in Performing the Methods of the Invention

[0793] The Integrated Resource of Protein Families, Domains and Sites (InterPro) database is an integrated interface for the commonly used signature databases for text- and sequence-based searches. The InterPro database combines these databases, which use different methodologies and varying degrees of biological information about well-characterized proteins to derive protein signatures. Collaborating databases include SWISS-PROT, PROSITE, TrEMBL, PRINTS, ProDom and Pfam, Smart and TIGRFAMs. Pfam is a large collection of multiple sequence alignments and hidden Markov models covering many common protein domains and families. Pfam is hosted at the Sanger Institute server in the United Kingdom. Interpro is hosted at the European Bioinformatics Institute in the United Kingdom.

[0794] The results of the InterPro scan of the polypeptide sequence as represented by SEQ ID NO: 2 are presented in Table C1. The detected domains classify within the Interpro families IPR001092 (Basic helix-loop-helix dimerisation region bHLH) and IPR001092 (Basic helix-loop-helix dimerisation region bHLH).

TABLE C1
InterPro scan results (major accession numbers) of the
polypeptide sequence as represented by SEQ ID NO: 2.

| | | | Amino acid |
|---|---|---|---|
| | Accession | Accession | coordinates on |
| Database | number | name | SEQ ID NO 2 |
| HMMPfam | PF00010 | HLH | 449-498 |
| ProfileScan | PS50888 | HLH | 438-498 |
| superfamily | SSF47459 | HLH_basic | 451-522 |

[0795] The protein sequences representing the GRP (RrmJ/FtsJ polypeptide) are used as query to search the InterPro database. GRP polypeptides useful in performing the methods of the invention have a ribosomal RNA methyltransferase RrmJ/FtsJ domain (InterPro entries IPR002877 and IPR015507; Pfam entry PF01728; PANTHER entry PTHR10920).

[0796] The GRP polypeptide (bHLH4 polypeptide) sequences are used as query to search the InterPro database. GRP polypeptides useful in performing the methods of the invention match two InterPro entries: (i) IPR001092 basic helix-loop-helix dimerisation region bHLH; and (ii) IPR011598 helix-loop-helix DNA-binding.

TABLE C2

| | | Integrated | Integrated |
|---|---|---|---|
| | Integrated | database | database |
| InterPro accession | database | accession | accession |
| number | name | number | name |
| IPR001092 | Pfam | PF00010 | HLH |
| Basic helix-loop-helix | | | |
| dimerisation region | | | |
| bHLH | | | |
| IPR001092 | SMART | SM00353 | HLH |
| Basic helix-loop-helix | | | |
| dimerisation region | | | |
| bHLH | | | |
| IPR001092 | Prosite | PS50888 | HLH |
| Basic helix-loop-helix | | | |
| dimerisation region | | | |
| bHLH | | | |
| IPR011598 | | SSF47459 | HLH_basic |
| Helix-loop-helix DNA- | | | |
| binding | | | |
| unintegrated | Panther | PTHR12565 | |
| | Panther | PTHR12565 | SF7 |

[0797] The GRP polypeptide (IPT polypeptide) sequences are used as query to search the InterPro database. GRP polypeptides useful in performing the methods of the invention match InterPro entries: (i) IPR002627; and (ii) IPR011593, as shown in the table below:

TABLE C3

| InterPro accession | Integrated database | Integrated database | Integrated database |
|---|---|---|---|
| number | name | accession number | accession name |
| IPR002627 | ProDom | PD004674 | Q6GHD2_STAAR_Q6GHD2 |
| Family tRNA | | | |
| isopentenyltransferase | | | |
| | Panther | PTHR11088 | TRNA DELTA(2)- |
| | | | ISOPENTENYLPYROPHOSPHATE |
| | | | TRANSFERASE-RELATED |
| | Pfam | PF01715 | IPPT |
| IPR011593 | ProDom | PD005388 | Q9CA35_ARATH_Q9CA35 |
| Domain isopentenyl | | | |
| transferase-like | | | |
| No IPR integrated | Panther | PTHR11088:SF20 | CYTOKININ SYNTHASE |

[0798] The results of the InterPro scan of the polypeptide sequence as represented by SEQ ID NO: 166 are presented in Table C4.

TABLE C4
InterPro scan results (major accession numbers) of the polypeptide sequence as
represented by SEQ ID NO: 166.

| | | | | Amino acid | | Amino acid | |
|---|---|---|---|---|---|---|---|
| | | | | coordinates | | coordinates | |
| | | | Name | of the B- | | of the B- | |
| Interpro | Accession | Accession | Accession | box1 | | box2 | |
| hit | number | number | number | domain | E-value | domain | E-value |
| IPR000315 | PFAM | PF00643 | zf-B_box | [1-47] | 1.20E−10 | [58-105] | 8.00E−12 |
| | SMART | SM00336 | BBOX | [1-47] | 3.00E−11 | [58-105] | 4.80E−13 |
| | PROFILE | PS50119 | ZF_BBOX | [1-47] | 9.84 | [58-105] | 10.04 |

TABLE C5
Parameters used to build the HMMs for the B-box domain in pfam.

| | Pfam_ls [Download HMM] | Pfam_fs [Download HMM] |
|---|---|---|
| Gathering cutoff | 15.3 15.3; | 21.0 21.0 |
| Trusted cutoff | 15.5 15.5; | 21.0 21.0 |
| Noise cutoff | 15.2 15.2; | 20.8 20.8 |
| Build method of HMM | hmmbuild-F HMM_ls SEED | hmmbuild-f-F HMM_fs SEED |
| | hmmcalibrate --seed 0 HMM_ls | hmmcalibrate --seed 0 HMM_fs |

[0799] The results of the InterPro scan of the polypeptide sequence as represented by SEQ ID NO: 222 are presented in Table C6.

TABLE C6
InterPro scan results (major accession numbers) of the
polypeptide sequence as represented by SEQ ID NO: 222.

| | | | Amino acid | |
|---|---|---|---|---|
| | | | coordinates | |
| | Accession | | on SEQ | |
| Database | number | Accession name | ID NO 2 | e-value |
| INTERPRO | IPR001509 | NAD-dependent | [9-273] | 4.20E−74 |
| | | epimerase/ | | |
| | | dehydratase | | |
| PFAM | PF01370 | Epimerase | [9-273] | 4.20E−74 |

### Example 5

### Topology Prediction of the Polypeptide Sequences Useful in Performing the Methods of the Invention

[0800] TargetP 1.1 predicts the subcellular location of eukaryotic proteins. The location assignment is based on the predicted presence of any of the N-terminal pre-sequences: chloroplast transit peptide (cTP), mitochondrial targeting peptide (mTP) or secretory pathway signal peptide (SP). Scores on which the final prediction is based are not really probabilities, and they do not necessarily add to one. However, the location with the highest score is the most likely according to TargetP, and the relationship between the scores (the reliability class) may be an indication of how certain the prediction is. The reliability class (RC) ranges from 1 to 5, where 1 indicates the strongest prediction. TargetP is maintained at the server of the Technical University of Denmark.

[0801] For the sequences predicted to contain an N-terminal presequence a potential cleavage site can also be predicted.

[0802] A number of parameters were selected, such as organism group (non-plant or plant), cutoff sets (none, predefined set of cutoffs, or user-specified set of cutoffs), and the calculation of prediction of cleavage sites (yes or no).

[0803] The results of TargetP 1.1 analysis of the polypeptide sequence as represented by SEQ ID NO: 2 are presented Table D. The “plant” organism group has been selected, no cutoffs defined, and the predicted length of the transit peptide requested. The subcellular localization of the polypeptide sequence as represented by SEQ ID NO: 2 may be the cytoplasm or nucleus, no transit peptide is predicted.

TABLE D1
TargetP 1.1 analysis of the polypeptide sequence as
represented by SEQ ID NO: 2

| | |
|---|---|
| Length (AA) | 623 |
| Chloroplastic transit peptide | 0.155 |
| Mitochondrial transit peptide | 0.143 |
| Secretory pathway signal peptide | 0.099 |
| Other subcellular targeting | 0.816 |
| Predicted Location | / |
| Reliability class | 2 |
| Predicted transit peptide length | / |

[0804] When analysed with the PredictNLS algorithm, a nuclear localisation is predicted for SEQ ID NO: 2 with a probability of 98%:

| NLS | From | To | signal | Type |
|---|---|---|---|---|
| [KR][KR] × [KR][KR][KR] × [KR][KR] | 433 | 441 | KRPKKRGRK | Potential |

| NumWithNLS | % NucProt |
|---|---|
| 54 | 98.14 |

[0805] Many other algorithms can be used to perform such analyses, including:
[0806] ChloroP 1.1 hosted on the server of the Technical University of Denmark;
[0807] Protein Prowler Subcellular Localisation Predictor version 1.2 hosted on the server of the Institute for Molecular Bioscience, University of Queensland, Brisbane, Australia;
[0808] PENCE Proteome Analyst PA-GOSUB 2.5 hosted on the server of the University of Alberta, Edmonton, Alberta, Canada;
[0809] TMHMM, hosted on the server of the Technical University of Denmark

[0810] The protein sequences representing the GRP are used to query TargetP 1.1. The “plant” organism group is selected, no cutoffs defined, and the predicted length of the transit peptide requested.

[0811] The results of TargetP 1.1 analysis of the polypeptide sequence as represented by SEQ ID NO: 225 are presented Table D. The “plant” organism group has been selected, no cutoffs defined, and the predicted length of the transit peptide requested. The polypeptide sequence as represented by SEQ ID NO: 225 may be channelled through the secretory pathway to its final subcellular localization.

TABLE D2
TargetP 1.1 analysis of the polypeptide sequence as
represented by SEQ ID NO: 222

| | |
|---|---|
| Length (AA) | 354 |
| Chloroplastic transit peptide | / |
| Mitochondrial transit peptide | 0.218 |
| Secretory pathway signal peptide | 0.451 |
| Other subcellular targeting | 0.268 |
| Predicted Location | S* |
| Reliability class | 5 |
| Predicted transit peptide length | / |

*S: secretory pathway.

### Example 6

### Functional Assay for the bHLH6-like Polypeptide

[0812] A DNA-binding assay for AtbHLH6 is provided in Dombrecht et al. (2007). Briefly, a 1000-bp fragment of the AtbHLH6 coding sequence encompassing codons 285 to 623 was amplified from genomic DNA and cloned into the Nhel-BamHI-digested pTacLCELD6·His vector (Xue, Plant J. 41, 638-649, 2005). The resulting construct encoded the last 338 amino acids of AtbHLH6 (including the bHLH region) in-frame with the reporter protein CelD and a 6×His tag. Correct amplification and cloning were verified by DNA sequencing.

[0813] Determination of the consensus sequence of the MYC2 DNA binding motif and the relative binding affinity of these sites was done according to Xue (2005), wherein a fusion of a DNA-binding protein (DBP) to 6•His-tagged cellulase D (CELD) serves both as a means for affinity purification of DBP-DNA complex in the selection of binding sites from a pool of biotinylated random-sequence oligonucleotides and as a reporter for measurement of DNA-binding activity. For the selection of binding-sites using cellulose paper as an affinity matrix, DBP-CELD was incubated at room temperature for 1 h with 20 ng of a biotin-labelled Bio-RS-Oligo in 40 μl of binding/washing buffer (described above) containing 1 mM EDTA, 0.25 μg μl⁻¹ poly d(AC-TG), 1 mg ml⁻¹ BSA and 10% glycerol. An appropriate amount of crude DBP-CELD used for binding-site selection was that achieving 20-30% relative cellulose binding efficiency (percentage cellulose activity bound to cellulose after washing). DBP-CELD/Bio-RS-Oligo mixtures were transferred to 96-well microplate wells containing Whatman 1 filter paper (4 mm²) which was pre-soaked with 10 μl blocking solution [binding/washing buffer containing 0.5 μg μl⁻¹ poly d(AC-TG) and 10% glycerol]. After incubation at 0° C. for 1 hr with gentle shaking, the cellulose paper was washed six times with binding/washing buffer containing 1 mM EDTA and 0.1 mg ml⁻¹ BSA. The use of extensive washing in the target site selection was based on observations of the relatively high stability of DBP-oligonucleotide complex immobilized on solid matrix. DBP-CELD carrying target binding sites were eluted at 40° C. for 15 min with 40 μl of cellulase eluting buffer [10 mM HEPES, pH7, 50 mM KCl, 0.2 mM EDTA, 4 mM cellobiose, 0.05 mg ml⁻¹ BSA and 10 μg ml⁻¹ of a sense sequence-specific primer SP-S]. The eluate was used for PCR amplification of selected oligonucleotides. The PCR product (0.1 μl) without purification was used for the next round of site selection.

[0814] Alternatively, 6•His tagged DBP-CELD (10-25 μg crude protein) was incubated in 60 μl of PNT buffer (50 mM sodium phosphate, pH8.0, 300 mM NaCl and 0.05% Tween 20) containing 10 mM imidazole and 350 μg Ni-NTA magnetic agarose beads (Qiagen) at room temperature for 45-60 min with gentle shaking in a micro-tube mixer (Tomy Seiko Co., Tokyo, Japan). The Ni-NTA magnetic beads were collected at the side of the tubes by placing tubes in a 12-tube magnet (Qiagen). Unbound proteins were removed by washing twice with 150-200 μl of PNT containing 20 mM imidazole and once with 60 μl of binding/washing buffer containing 2 mM MgCl₂, 1 mg ml⁻¹ BSA and 10% glycerol. Washed beads were suspended in 40 μl of binding/washing buffer containing 2 mM MgCl₂, 0.25 μg μl⁻¹ poly d(AC-TG), 1 mg ml⁻¹ BSA, 0.0025% Nonidet P-40, 10% glycerol and biotin-labelled oligonucleotides (50 ng Bio-RS-Oligo or 1 μl of PCR product amplified from previously selected oligonucleotides). The suspension was incubated at room temperature for 1.5 h with gentle shaking in the micro-tube mixer. After washing four times (3-4 min each washing) with 150-200 μl of binding/washing buffer containing 2 mM MgCl₂, 0.1 mg ml⁻¹ BSA and 0.0025% Nonidet P-40, the beads carrying target site-bound BDP-CELD were resuspended in 8 μl of 5 mM Tris-Cl (pH 8.0)/0.5 mM EDTA containing 5 μg ml⁻¹ of a sense sequence-specific primer (SP-S) and the suspension was transferred to a clean tube and used for PCR amplification of selected oligonucleotides. The PCR product (1 μl) without purification was used for the next round of site selection. For EMSA assays, 6•His-tagged DBP-CELD proteins were purified using Ni-NTA magnetic agarose beads using a high stringent binding buffer (50 mMsodium phosphate, pH8.0, 1 MNaCl, 10% glycerol, 1% Tween 20 and 10 mM imidazole) and the rest of the procedure followed the manufacturer's instruction. Double-stranded synthetic oligonucleotides (30-45 fmol) labelled with digoxigenin at the 3′-end were incubated with a purified DBP (30-75 ng) in 15 μl of binding buffer [25 mM HEPES/KOH, pH 7.0, 50 mM KCl, 0.5 mM DTT, 2 mM MgCl₂, 0.2 μg μl⁻¹ poly d(AC-TG), 0.3 mg ml⁻¹ BSA and 10% glycerol]. After incubation at room temperature for 30 min, DBP/DNA complexes were separated from free probes on a 6% polyacrylamide gel in a 40-mM Tris-acetate buffer (pH 7.5) containing 5 mM Na acetate, 0.5 mM EDTA and 5% glycerol. The DBP/DNA complexes and free probes in the gels after electrophoresis were transferred to a Hybond N [symbol] membrane. Alkaline phosphatase-conjugated anti-digoxigenin antibody and a chemiluminescent substrate, CDP-Star (Roche Diagnostics) was used for detection of digoxigenin according to the manufacturer's instructions. Further details are provided in Xue (2005).

### Example 7

### Cloning of the Nucleic Acid Sequence Used in the Methods of the Invention

[0815] The nucleic acid sequence used in the methods of the invention was amplified by PCR using as template a custom-made Arabidopsis thaliana seedlings cDNA library (in pCMV Sport 6.0; Invitrogen, Paisley, UK). PCR was performed using Hifi Taq DNA polymerase in standard conditions, using 200 ng of template in a 50 μl PCR mix. The primers used were prm06515 (SEQ ID NO: 10; sense, start codon in bold):

5′-ggggacaagtttgtacaaaaaagcaggcttaaacaatgactgattac
cggctacaa-3′

and prm06516 (SEQ ID NO: 11; reverse, complementary):

5′-ggggaccactttgtacaagaaagctgggtacacccttttaaccga
ttttt-3′,

which include the AttB sites for Gateway recombination. The amplified PCR fragment was purified also using standard methods. The first step of the Gateway procedure, the BP reaction, was then performed, during which the PCR fragment recombines in vivo with the pDONR201 plasmid to produce, according to the Gateway terminology, an “entry clone”, pbHLH6-like. Plasmid pDONR201 was purchased from Invitrogen, as part of the Gateway® technology.

[0816] The entry clone comprising SEQ ID NO: 1 was then used in an LR reaction with a destination vector used for Oryza sativa transformation. This vector contained as functional elements within the T-DNA borders: a plant selectable marker; a screenable marker expression cassette; and a Gateway cassette intended for LR in vivo recombination with the nucleic acid sequence of interest already cloned in the entry clone. A rice GOS2 promoter (SEQ ID NO: 12) for root specific expression was located upstream of this Gateway cassette.

[0817] After the LR recombination step, the resulting expression vector pGOS2::bHLH6-like (FIG. 3) was transformed into Agrobacterium strain LBA4044 according to methods well known in the art.

### Example 8

### Plant Transformation

### Rice Transformation

[0818] The Agrobacterium containing the expression vector was used to transform Oryza sativa plants. Mature dry seeds of the rice japonica cultivar Nipponbare were dehusked. Sterilization was carried out by incubating for one minute in 70% ethanol, followed by 30 minutes in 0.2% HgCl₂, followed by a 6 times 15 minutes wash with sterile distilled water. The sterile seeds were then germinated on a medium containing 2,4-D (callus induction medium). After incubation in the dark for four weeks, embryogenic, scutellum-derived calli were excised and propagated on the same medium. After two weeks, the calli were multiplied or propagated by subculture on the same medium for another 2 weeks. Embryogenic callus pieces were sub-cultured on fresh medium 3 days before co-cultivation (to boost cell division activity).

[0819] Agrobacterium strain LBA4404 containing the expression vector was used for co-cultivation. Agrobacterium was inoculated on AB medium with the appropriate antibiotics and cultured for 3 days at 28° C. The bacteria were then collected and suspended in liquid co-cultivation medium to a density (OD₆₀₀) of about 1. The suspension was then transferred to a Petri dish and the calli immersed in the suspension for 15 minutes. The callus tissues were then blotted dry on a filter paper and transferred to solidified, co-cultivation medium and incubated for 3 days in the dark at 25° C. Co-cultivated calli were grown on 2,4-D-containing medium for 4 weeks in the dark at 28° C. in the presence of a selection agent. During this period, rapidly growing resistant callus islands developed. After transfer of this material to a regeneration medium and incubation in the light, the embryogenic potential was released and shoots developed in the next four to five weeks. Shoots were excised from the calli and incubated for 2 to 3 weeks on an auxin-containing medium from which they were transferred to soil. Hardened shoots were grown under high humidity and short days in a greenhouse.

[0820] Approximately 35 independent T0 rice transformants were generated for one construct. The primary transformants were transferred from a tissue culture chamber to a greenhouse. After a quantitative PCR analysis to verify copy number of the T-DNA insert, only single copy transgenic plants that exhibit tolerance to the selection agent were kept for harvest of T1 seed. Seeds were then harvested three to five months after transplanting. The method yielded single locus transformants at a rate of over 50% (Aldemita and Hodges1996, Chan et al. 1993, Hiei et al. 1994).

### Corn Transformation

[0821] Transformation of maize (Zea mays) is performed with a modification of the method described by Ishida et al. (1996) Nature Biotech 14(6): 745-50. Transformation is genotype-dependent in corn and only specific genotypes are amenable to transformation and regeneration. The inbred line A188 (University of Minnesota) or hybrids with A188 as a parent are good sources of donor material for transformation, but other genotypes can be used successfully as well. Ears are harvested from corn plant approximately 11 days after pollination (DAP) when the length of the immature embryo is about 1 to 1.2 mm. Immature embryos are cocultivated with Agrobacterium tumefaciens containing the expression vector, and transgenic plants are recovered through organogenesis. Excised embryos are grown on callus induction medium, then maize regeneration medium, containing the selection agent (for example imidazolinone but various selection markers can be used). The Petri plates are incubated in the light at 25° C. for 2-3 weeks, or until shoots develop. The green shoots are transferred from each embryo to maize rooting medium and incubated at 25° C. for 2-3 weeks, until roots develop. The rooted shoots are transplanted to soil in the greenhouse. T1 seeds are produced from plants that exhibit tolerance to the selection agent and that contain a single copy of the T-DNA insert.

### Wheat Transformation

[0822] Transformation of wheat is performed with the method described by Ishida et al. (1996) Nature

[0823] Biotech 14(6): 745-50. The cultivar Bobwhite (available from CIMMYT, Mexico) is commonly used in transformation. Immature embryos are co-cultivated with Agrobacterium tumefaciens containing the expression vector, and transgenic plants are recovered through organogenesis. After incubation with Agrobacterium, the embryos are grown in vitro on callus induction medium, then regeneration medium, containing the selection agent (for example imidazolinone but various selection markers can be used). The Petri plates are incubated in the light at 25° C. for 2-3 weeks, or until shoots develop. The green shoots are transferred from each embryo to rooting medium and incubated at 25° C. for 2-3 weeks, until roots develop. The rooted shoots are transplanted to soil in the greenhouse. T1 seeds are produced from plants that exhibit tolerance to the selection agent and that contain a single copy of the T-DNA insert.

### Soybean Transformation

[0824] Soybean is transformed according to a modification of the method described in the Texas A&M U.S. Pat. No. 5,164,310. Several commercial soybean varieties are amenable to transformation by this method. The cultivar Jack (available from the Illinois Seed foundation) is commonly used for transformation. Soybean seeds are sterilised for in vitro sowing. The hypocotyl, the radicle and one cotyledon are excised from seven-day old young seedlings. The epicotyl and the remaining cotyledon are further grown to develop axillary nodes. These axillary nodes are excised and incubated with Agrobacterium tumefaciens containing the expression vector. After the cocultivation treatment, the explants are washed and transferred to selection media. Regenerated shoots are excised and placed on a shoot elongation medium. Shoots no longer than 1 cm are placed on rooting medium until roots develop. The rooted shoots are transplanted to soil in the greenhouse. T1 seeds are produced from plants that exhibit tolerance to the selection agent and that contain a single copy of the T-DNA insert.

### Rapeseed/Canola Transformation

[0825] Cotyledonary petioles and hypocotyls of 5-6 day old young seedling are used as explants for tissue culture and transformed according to Babic et al. (1998, Plant Cell Rep 17: 183-188). The commercial cultivar Westar (Agriculture Canada) is the standard variety used for transformation, but other varieties can also be used. Canola seeds are surface-sterilized for in vitro sowing. The cotyledon petiole explants with the cotyledon attached are excised from the in vitro seedlings, and inoculated with Agrobacterium (containing the expression vector) by dipping the cut end of the petiole explant into the bacterial suspension. The explants are then cultured for 2 days on MSBAP-3 medium containing 3 mg/l BAP, 3% sucrose, 0.7% Phytagar at 23° C., 16 hr light. After two days of co-cultivation with Agrobacterium, the petiole explants are transferred to MSBAP-3 medium containing 3 mg/l BAP, cefotaxime, carbenicillin, or timentin (300 mg/l) for 7 days, and then cultured on MSBAP-3 medium with cefotaxime, carbenicillin, or timentin and selection agent until shoot regeneration. When the shoots are 5-10 mm in length, they are cut and transferred to shoot elongation medium (MSBAP-0.5, containing 0.5 mg/l BAP). Shoots of about 2 cm in length are transferred to the rooting medium (MS0) for root induction. The rooted shoots are transplanted to soil in the greenhouse. T1 seeds are produced from plants that exhibit tolerance to the selection agent and that contain a single copy of the T-DNA insert.

### Alfalfa Transformation

[0826] A regenerating clone of alfalfa (Medicago sativa) is transformed using the method of (McKersie et al., 1999 Plant Physiol 119: 839-847). Regeneration and transformation of alfalfa is genotype dependent and therefore a regenerating plant is required. Methods to obtain regenerating plants have been described. For example, these can be selected from the cultivar Rangelander (Agriculture Canada) or any other commercial alfalfa variety as described by Brown DCW and A Atanassov (1985. Plant Cell Tissue Organ Culture 4: 111-112). Alternatively, the RA3 variety (University of Wisconsin) has been selected for use in tissue culture (Walker et al., 1978 Am J Bot 65:654-659). Petiole explants are cocultivated with an overnight culture of Agrobacterium tumefaciens C58C1 pMP90 (McKersie et al., 1999 Plant Physiol 119: 839-847) or LBA4404 containing the expression vector. The explants are cocultivated for 3 d in the dark on SH induction medium containing 288 mg/L Pro, 53 mg/L thioproline, 4.35 g/L K2SO4, and 100 μm acetosyringinone. The explants are washed in half-strength Murashige-Skoog medium (Murashige and Skoog, 1962) and plated on the same SH induction medium without acetosyringinone but with a suitable selection agent and suitable antibiotic to inhibit Agrobacterium growth. After several weeks, somatic embryos are transferred to BOi2Y development medium containing no growth regulators, no antibiotics, and 50 g/L sucrose. Somatic embryos are subsequently germinated on half-strength Murashige-Skoog medium. Rooted seedlings were transplanted into pots and grown in a greenhouse. T1 seeds are produced from plants that exhibit tolerance to the selection agent and that contain a single copy of the T-DNA insert.

### Cotton Transformation

[0827] Cotton is transformed using Agrobacterium tumefaciens according to the method described in U.S. Pat. No. 5,159,135. Cotton seeds are surface sterilised in 3% sodium hypochlorite solution during 20 minutes and washed in distilled water with 500 μg/ml cefotaxime. The seeds are then transferred to SH-medium with 50 μg/ml benomyl for germination. Hypocotyls of 4 to 6 days old seedlings are removed, cut into 0.5 cm pieces and are placed on 0.8% agar. An Agrobacterium suspension (approx. 108 cells per ml, diluted from an overnight culture transformed with the gene of interest and suitable selection markers) is used for inoculation of the hypocotyl explants. After 3 days at room temperature and lighting, the tissues are transferred to a solid medium (1.6 g/l Gelrite) with Murashige and Skoog salts with B5 vitamins (Gamborg et al., Exp. Cell Res. 50:151-158 (1968)), 0.1 mg/l 2,4-D, 0.1 mg/l 6-furfurylaminopurine and 750 μg/ml MgCL2, and with 50 to 100 μg/ml cefotaxime and 400-500 μg/ml carbenicillin to kill residual bacteria. Individual cell lines are isolated after two to three months (with subcultures every four to six weeks) and are further cultivated on selective medium for tissue amplification (30° C., 16 hr photoperiod). Transformed tissues are subsequently further cultivated on non-selective medium during 2 to 3 months to give rise to somatic embryos. Healthy looking embryos of at least 4 mm length are transferred to tubes with SH medium in fine vermiculite, supplemented with 0.1 mg/l indole acetic acid, 6 furfurylaminopurine and gibberellic acid. The embryos are cultivated at 30° C. with a photoperiod of 16 hrs, and plantlets at the 2 to 3 leaf stage are transferred to pots with vermiculite and nutrients. The plants are hardened and subsequently moved to the greenhouse for further cultivation.

### Example 9

### Phenotypic Evaluation Procedure

### 9.1 Evaluation Setup

[0828] Approximately 35 independent T0 rice transformants were generated. The primary transformants were transferred from a tissue culture chamber to a greenhouse for growing and harvest of T1 seed. Six events, of which the T1 progeny segregated 3:1 for presence/absence of the transgene, were retained. For each of these events, approximately 10 T1 seedlings containing the transgene (hetero- and homo-zygotes) and approximately 10 T1 seedlings lacking the transgene (nullizygotes) were selected by monitoring visual marker expression. The transgenic plants and the corresponding nullizygotes were grown side-by-side at random positions. Greenhouse conditions were of shorts days (12 hours light), 28° C. in the light and 22° C. in the dark, and a relative humidity of 70%.

[0829] Four T1 events were further evaluated in the T2 generation following the same evaluation procedure as for the T1 generation but with more individuals per event. From the stage of sowing until the stage of maturity the plants were passed several times through a digital imaging cabinet. At each time point digital images (2048×1536 pixels, 16 million colours) were taken of each plant from at least 6 different angles.

### Drought Screen

[0830] Plants from T2 seeds are grown in potting soil under normal conditions until they approached the heading stage. They are then transferred to a “dry” section where irrigation is withheld. Humidity probes are inserted in randomly chosen pots to monitor the soil water content (SWC). When SWC goes below certain thresholds, the plants are automatically re-watered continuously until a normal level is reached again. The plants are then re-transferred again to normal conditions. The rest of the cultivation (plant maturation, seed harvest) is the same as for plants not grown under abiotic stress conditions. Growth and yield parameters are recorded as detailed for growth under normal conditions.

### Nitrogen Use Efficiency Screen

[0831] Rice plants from T2 seeds are grown in potting soil under normal conditions except for the nutrient solution. The pots are watered from transplantation to maturation with a specific nutrient solution containing reduced N nitrogen (N) content, usually between 7 to 8 times less. The rest of the cultivation (plant maturation, seed harvest) is the same as for plants not grown under abiotic stress. Growth and yield parameters are recorded as detailed for growth under normal conditions.

### Salt Stress Screen

[0832] Plants are grown on a substrate made of coco fibers and argex (3 to 1 ratio). A normal nutrient solution is used during the first two weeks after transplanting the plantlets in the greenhouse. After the first two weeks, 25 mM of salt (NaCl) is added to the nutrient solution, until the plants were harvested. Seed-related parameters are then measured.

### 9.2 Statistical Analysis: F Test

[0833] A two factor ANOVA (analysis of variants) was used as a statistical model for the overall evaluation of plant phenotypic characteristics. An F test was carried out on all the parameters measured of all the plants of all the events transformed with the gene of the present invention. The F test was carried out to check for an effect of the gene over all the transformation events and to verify for an overall effect of the gene, also known as a global gene effect. The threshold for significance for a true global gene effect was set at a 5% probability level for the F test. A significant F test value points to a gene effect, meaning that it is not only the mere presence or position of the gene that is causing the differences in phenotype.

[0834] Because two experiments with overlapping events were carried out, a combined analysis was performed. This is useful to check consistency of the effects over the two experiments, and if this is the case, to accumulate evidence from both experiments in order to increase confidence in the conclusion. The method used was a mixed-model approach that takes into account the multilevel structure of the data (i.e. experiment-event-segregants). P values were obtained by comparing likelihood ratio test to chi square distributions.

### 9.3 Parameters Measured

### Biomass-Related Parameter Measurement

[0835] From the stage of sowing until the stage of maturity the plants were passed several times through a digital imaging cabinet. At each time point digital images (2048×1536 pixels, 16 million colours) were taken of each plant from at least 6 different angles.

[0836] The plant aboveground area (or leafy biomass) was determined by counting the total number of pixels on the digital images from aboveground plant parts discriminated from the background. This value was averaged for the pictures taken on the same time point from the different angles and was converted to a physical surface value expressed in square mm by calibration. Experiments show that the aboveground plant area measured this way correlates with the biomass of plant parts above ground. The above ground area is the area measured at the time point at which the plant had reached its maximal leafy biomass. The early vigour is the plant (seedling) aboveground area three weeks post-germination.

[0837] Early vigour was determined by counting the total number of pixels from aboveground plant parts discriminated from the background. This value was averaged for the pictures taken on the same time point from different angles and was converted to a physical surface value expressed in square mm by calibration. The results described below are for plants three weeks post-germination.

### Seed-Related Parameter Measurements

[0838] The mature primary panicles were harvested, counted, bagged, barcode-labelled and then dried for three days in an oven at 37° C. The panicles were then threshed and all the seeds were collected and counted. The filled husks were separated from the empty ones using an air-blowing device. The empty husks were discarded and the remaining fraction was counted again. The filled husks were weighed on an analytical balance. The number of filled seeds was determined by counting the number of filled husks that remained after the separation step. The total seed yield was measured by weighing all filled husks harvested from a plant. Total seed number per plant was measured by counting the number of husks harvested from a plant. Thousand Kernel Weight (TKW) is extrapolated from the number of filled seeds counted and their total weight. The Harvest Index (HI) in the present invention is defined as the ratio between the total seed yield and the above ground area (mm²), multiplied by a factor 10⁶. The total number of flowers per panicle as defined in the present invention is the ratio between the total number of seeds and the number of mature primary panicles. The seed fill rate as defined in the present invention is the proportion (expressed as a %) of the number of filled seeds over the total number of seeds (or florets). Number of flowers per panicle was calculated from the number of total seeds and the number of first panicles and is an estimation of the average number of florets per panicle on a plant.

### Example 10

### Results of the Phenotypic Evaluation of the Transgenic Plants

[0839] Transgenic rice plants expressing the bHLH6-like protein of SEQ ID NO: 2 grown under normal growth conditions showed compared to the control plants, an increase in emergence vigour and in seed yield (as demonstrated by number of flowers per panicle, see table below). These increases were measured in 2 experiments with T1 and T2 generation plants and were statistically significant.

| | T1 generation | T2 generation |
|---|---|---|
| parameter | % increase | % increase |
| Emergence vigour | 11.9 | 2.8 |
| number of flowers per panicle | 7.4 | 6.2 |

[0840] Furthermore positive effects were observed for total weight of seeds, number of filled seeds and harvest index, in the T1 generation as well as in T2 generation.

### Example 11

### Cloning of the Nucleic Acid Sequence Used in the Methods of the Invention

### Cloning of SEQ ID NO: 57 (Coding for RrmJ/FtsJ Methyltransferase):

[0841] A cDNA-AFLP experiment performed on a synchronized tobacco BY2 cell culture (Nicotiana tabacum L. cv. Bright Yellow-2), and BY2 expressed sequence tags that were cell cycle modulated could be identified and were elected for further cloning. The expressed sequence tags were used to screen a tobacco cDNA library (in a Gateway compatible vector; Invitrogen, Paisley, UK) to isolate the full-length cDNA of interest, namely one coding for RrmJ/FtsJ methyltransferase nucleic acid sequence as represented by SEQ ID NO: 57.

[0842] The isolated plasmid comprising SEQ ID NO: 57 was then used in an LR reaction with a destination vector used for Oryza sativa transformation. This vector contained as functional elements within the T-DNA borders: a plant selectable marker; a screenable marker expression cassette; and a Gateway cassette intended for LR in vivo recombination with the nucleic acid sequence of interest already cloned in the entry clone. A rice oleosin promoter (SEQ ID NO: 91) for seed specific expression was located upstream of this Gateway cassette.

[0843] After the LR recombination step, the resulting expression vector pOleo::GRP (FIG. 6) was transformed into Agrobacterium strain LBA4044 according to methods well known in the art.

### Example 12

### Plant Transformation

### Rice Transformation

[0844] The Agrobacterium containing the expression vector was used to transform Oryza sativa plants. Mature dry seeds of the rice japonica cultivar Nipponbare were dehusked. Sterilization was carried out by incubating for one minute in 70% ethanol, followed by 30 minutes in 0.2% HgCl₂, followed by a 6 times 15 minutes wash with sterile distilled water. The sterile seeds were then germinated on a medium containing 2,4-D (callus induction medium). After incubation in the dark for four weeks, embryogenic, scutellum-derived calli were excised and propagated on the same medium. After two weeks, the calli were multiplied or propagated by subculture on the same medium for another 2 weeks. Embryogenic callus pieces were sub-cultured on fresh medium 3 days before co-cultivation (to boost cell division activity).

[0845] Agrobacterium strain LBA4404 containing the expression vector was used for co-cultivation. Agrobacterium was inoculated on AB medium with the appropriate antibiotics and cultured for 3 days at 28° C. The bacteria were then collected and suspended in liquid co-cultivation medium to a density (OD₆₀₀) of about 1. The suspension was then transferred to a Petri dish and the calli immersed in the suspension for 15 minutes. The callus tissues were then blotted dry on a filter paper and transferred to solidified, co-cultivation medium and incubated for 3 days in the dark at 25° C. Co-cultivated calli were grown on 2,4-D-containing medium for 4 weeks in the dark at 28° C. in the presence of a selection agent. During this period, rapidly growing resistant callus islands developed. After transfer of this material to a regeneration medium and incubation in the light, the embryogenic potential was released and shoots developed in the next four to five weeks. Shoots were excised from the calli and incubated for 2 to 3 weeks on an auxin-containing medium from which they were transferred to soil. Hardened shoots were grown under high humidity and short days in a greenhouse.

[0846] Approximately 35 independent T0 rice transformants were generated for one construct. The primary transformants were transferred from a tissue culture chamber to a greenhouse. After a quantitative PCR analysis to verify copy number of the T-DNA insert, only single copy transgenic plants that exhibit tolerance to the selection agent were kept for harvest of T1 seed. Seeds were then harvested three to five months after transplanting. The method yielded single locus transformants at a rate of over 50% (Aldemita and Hodges1996, Chan et al. 1993, Hiei et al. 1994).

### Example 13

### Phenotypic Evaluation Procedure

### 13.1 Evaluation Setup

[0847] Approximately 35 independent T0 rice transformants were generated. The primary transformants were transferred from a tissue culture chamber to a greenhouse for growing and harvest of T1 seed. Six events, of which the T1 progeny segregated 3:1 for presence/absence of the transgene, were retained. For each of these events, approximately 10 T1 seedlings containing the transgene (hetero- and homo-zygotes) and approximately 10 T1 seedlings lacking the transgene (nullizygotes) were selected by monitoring visual marker expression. The transgenic plants and the corresponding nullizygotes were grown side-by-side at random positions. Greenhouse conditions were of shorts days (12 hours light), 28° C. in the light and 22° C. in the dark, and a relative humidity of 70%.

[0848] Four T1 events were further evaluated in the T2 generation following the same evaluation procedure as for the T1 generation but with more individuals per event.

[0849] From the stage of sowing until the stage of maturity the plants were passed several times through a digital imaging cabinet. At each time point digital images (2048×1536 pixels, 16 million colours) were taken of each plant from at least 6 different angles.

### Drought Screen

[0850] Plants from T2 seeds are grown in potting soil under normal conditions until they approached the heading stage. They are then transferred to a “dry” section where irrigation is withheld. Humidity probes are inserted in randomly chosen pots to monitor the soil water content (SWC). When SWC goes below certain thresholds, the plants are automatically re-watered continuously until a normal level is reached again. The plants are then re-transferred again to normal conditions. The rest of the cultivation (plant maturation, seed harvest) is the same as for plants not grown under abiotic stress conditions. Growth and yield parameters are recorded as detailed for growth under normal conditions.

[0851] Nitrogen Use Efficiency Screen

[0852] Rice plants from T2 seeds are grown in potting soil under normal conditions except for the nutrient solution. The pots are watered from transplantation to maturation with a specific nutrient solution containing reduced N nitrogen (N) content, usually between 7 to 8 times less. The rest of the cultivation (plant maturation, seed harvest) is the same as for plants not grown under abiotic stress. Growth and yield parameters are recorded as detailed for growth under normal conditions.

### 13.2 Statistical Analysis: F Test

[0853] A two factor ANOVA (analysis of variants) was used as a statistical model for the overall evaluation of plant phenotypic characteristics. An F test was carried out on all the parameters measured of all the plants of all the events transformed with the gene of the present invention. The F test was carried out to check for an effect of the gene over all the transformation events and to verify for an overall effect of the gene, also known as a global gene effect. The threshold for significance for a true global gene effect was set at a 5% probability level for the F test. A significant F test value points to a gene effect, meaning that it is not only the mere presence or position of the gene that is causing the differences in phenotype.

[0854] Because two experiments with overlapping events were carried out, a combined analysis is performed. This is useful to check consistency of the effects over the two experiments, and if this is the case, to accumulate evidence from both experiments in order to increase confidence in the conclusion. The method used is a mixed-model approach that takes into account the multilevel structure of the data (i.e. experiment-event-segregants). P values were obtained by comparing likelihood ratio test to chi square distributions.

### 13.3 Parameters Measured

### Biomass-Related Parameter Measurement

[0855] The plant aboveground area (or leafy biomass) was determined by counting the total number of pixels on the digital images from aboveground plant parts discriminated from the background. This value was averaged for the pictures taken on the same time point from the different angles and was converted to a physical surface value expressed in square mm by calibration. Experiments show that the aboveground plant area measured this way correlates with the biomass of plant parts above ground. The above ground area is the area measured at the time point at which the plant had reached its maximal leafy biomass.

### Seed-Related Parameter Measurements

[0856] The mature primary panicles were harvested, counted, bagged, barcode-labelled and then dried for three days in an oven at 37° C. The panicles were then threshed and all the seeds were collected and counted. The filled husks were separated from the empty ones using an air-blowing device. The empty husks were discarded and the remaining fraction was counted again. The filled husks were weighed on an analytical balance. The number of filled seeds was determined by counting the number of filled husks that remained after the separation step. The total seed yield was measured by weighing all filled husks harvested from a plant. Total seed number per plant was measured by counting the number of husks harvested from a plant. Thousand Kernel Weight (TKW) is extrapolated from the number of filled seeds counted and their total weight. The Harvest Index (HI) in the present invention is defined as the ratio between the total seed yield and the above ground area (mm²), multiplied by a factor 10⁶. The total number of flowers per panicle as defined in the present invention is the ratio between the total number of seeds and the number of mature primary panicles. The seed fill rate as defined in the present invention is the proportion (expressed as a %) of the number of filled seeds over the total number of seeds (or florets).

### Example 14

### Results of the Phenotypic Evaluation of the Transgenic Plants

[0857] The transgenic rice plants expressing the GRP nucleic acid sequence represented by SEQ ID NO: 57 under control of the oleosin promoter showed an increase of more than 5% for total weight of seeds, number of filled seeds, fill rate, and harvest index.

| | Average % increase | Average % increase |
|---|---|---|
| | in 2 events in the T1 | in 2 events in the T2 |
| | generation | generation |
| Total seed yield per plant | 48% | 46% |
| Total number of filled seeds | 46% | 44% |
| Fill rate | 39% | 45% |
| Harvest index | 40% | 40% |

### Example 15

### Other Crop Transformation

### Corn Transformation

[0858] Transformation of maize (Zea mays) is performed with a modification of the method described by Ishida et al. (1996) Nature Biotech 14(6): 745-50. Transformation is genotype-dependent in corn and only specific genotypes are amenable to transformation and regeneration. The inbred line A188 (University of Minnesota) or hybrids with A188 as a parent are good sources of donor material for transformation, but other genotypes can be used successfully as well. Ears are harvested from corn plant approximately 11 days after pollination (DAP) when the length of the immature embryo is about 1 to 1.2 mm. Immature embryos are cocultivated with Agrobacterium tumefaciens containing the expression vector, and transgenic plants are recovered through organogenesis. Excised embryos are grown on callus induction medium, then maize regeneration medium, containing the selection agent (for example imidazolinone but various selection markers can be used). The Petri plates are incubated in the light at 25° C. for 2-3 weeks, or until shoots develop. The green shoots are transferred from each embryo to maize rooting medium and incubated at 25° C. for 2-3 weeks, until roots develop. The rooted shoots are transplanted to soil in the greenhouse. T1 seeds are produced from plants that exhibit tolerance to the selection agent and that contain a single copy of the T-DNA insert.

### Wheat Transformation

[0859] Transformation of wheat is performed with the method described by Ishida et al. (1996) Nature Biotech 14(6): 745-50. The cultivar Bobwhite (available from CIMMYT, Mexico) is commonly used in transformation. Immature embryos are co-cultivated with Agrobacterium tumefaciens containing the expression vector, and transgenic plants are recovered through organogenesis. After incubation with Agrobacterium, the embryos are grown in vitro on callus induction medium, then regeneration medium, containing the selection agent (for example imidazolinone but various selection markers can be used). The Petri plates are incubated in the light at 25° C. for 2-3 weeks, or until shoots develop. The green shoots are transferred from each embryo to rooting medium and incubated at 25° C. for 2-3 weeks, until roots develop. The rooted shoots are transplanted to soil in the greenhouse. T1 seeds are produced from plants that exhibit tolerance to the selection agent and that contain a single copy of the T-DNA insert.

### Soybean Transformation

[0860] Soybean is transformed according to a modification of the method described in the Texas A&M U.S. Pat. No. 5,164,310. Several commercial soybean varieties are amenable to transformation by this method. The cultivar Jack (available from the Illinois Seed foundation) is commonly used for transformation. Soybean seeds are sterilised for in vitro sowing. The hypocotyl, the radicle and one cotyledon are excised from seven-day old young seedlings. The epicotyl and the remaining cotyledon are further grown to develop axillary nodes. These axillary nodes are excised and incubated with Agrobacterium tumefaciens containing the expression vector. After the cocultivation treatment, the explants are washed and transferred to selection media. Regenerated shoots are excised and placed on a shoot elongation medium. Shoots no longer than 1 cm are placed on rooting medium until roots develop. The rooted shoots are transplanted to soil in the greenhouse. T1 seeds are produced from plants that exhibit tolerance to the selection agent and that contain a single copy of the T-DNA insert.

### Rapeseed/Canola Transformation

[0861] Cotyledonary petioles and hypocotyls of 5-6 day old young seedling are used as explants for tissue culture and transformed according to Babic et al. (1998, Plant Cell Rep 17: 183-188). The commercial cultivar Westar (Agriculture Canada) is the standard variety used for transformation, but other varieties can also be used. Canola seeds are surface-sterilized for in vitro sowing. The cotyledon petiole explants with the cotyledon attached are excised from the in vitro seedlings, and inoculated with Agrobacterium (containing the expression vector) by dipping the cut end of the petiole explant into the bacterial suspension. The explants are then cultured for 2 days on MSBAP-3 medium containing 3 mg/l BAP, 3% sucrose, 0.7% Phytagar at 23° C., 16 hr light. After two days of co-cultivation with Agrobacterium, the petiole explants are transferred to MSBAP-3 medium containing 3 mg/l BAP, cefotaxime, carbenicillin, or timentin (300 mg/l) for 7 days, and then cultured on MSBAP-3 medium with cefotaxime, carbenicillin, or timentin and selection agent until shoot regeneration. When the shoots are 5-10 mm in length, they are cut and transferred to shoot elongation medium (MSBAP-0.5, containing 0.5 mg/l BAP). Shoots of about 2 cm in length are transferred to the rooting medium (MS0) for root induction. The rooted shoots are transplanted to soil in the greenhouse. T1 seeds are produced from plants that exhibit tolerance to the selection agent and that contain a single copy of the T-DNA insert.

### Alfalfa Transformation

[0862] A regenerating clone of alfalfa (Medicago sativa) is transformed using the method of (McKersie et al., 1999 Plant Physiol 119: 839-847). Regeneration and transformation of alfalfa is genotype dependent and therefore a regenerating plant is required. Methods to obtain regenerating plants have been described. For example, these can be selected from the cultivar Rangelander (Agriculture Canada) or any other commercial alfalfa variety as described by Brown DCW and A Atanassov (1985. Plant Cell Tissue Organ Culture 4: 111-112). Alternatively, the RA3 variety (University of Wisconsin) has been selected for use in tissue culture (Walker et al., 1978 Am J Bot 65:654-659). Petiole explants are cocultivated with an overnight culture of Agrobacterium tumefaciens C58C1 pMP90 (McKersie et al., 1999 Plant Physiol 119: 839-847) or LBA4404 containing the expression vector. The explants are cocultivated for 3 d in the dark on SH induction medium containing 288 mg/L Pro, 53 mg/L thioproline, 4.35 g/L K2SO4, and 100 μm acetosyringinone. The explants are washed in half-strength Murashige-Skoog medium (Murashige and Skoog, 1962) and plated on the same SH induction medium without acetosyringinone but with a suitable selection agent and suitable antibiotic to inhibit Agrobacterium growth. After several weeks, somatic embryos are transferred to BOi2Y development medium containing no growth regulators, no antibiotics, and 50 g/L sucrose. Somatic embryos are subsequently germinated on half-strength Murashige-Skoog medium. Rooted seedlings were transplanted into pots and grown in a greenhouse. T1 seeds are produced from plants that exhibit tolerance to the selection agent and that contain a single copy of the T-DNA insert.

### Cotton Transformation

[0863] Cotton (Gossypium hirsutum L.) transformation is performed using Agrobacterium tumefaciens, on hypocotyls explants. The commercial cultivars such as Coker 130 or Coker 312 (SeedCo, Lubbock, Tex.) are standard varieties used for transformation, but other varieties can also be used. The seeds are surface sterilized and germinated in the dark. Hypocotyl explants are cut from the germinated seedlings to lengths of about 1-1.5 centimeter. The hypotocyl explant is submersed in the Agrobacterium tumefaciens inoculum containing the expression vector, for 5 minutes then co-cultivated for about 48 hours on MS+1.8 mg/l KNO3+2% glucose at 24° C., in the dark. The explants are transferred the same medium containing appropriate bacterial and plant selectable markers (renewed several times), until embryogenic calli is seen. The calli are separated and subcultured until somatic embryos appear. Plantlets derived from the somatic embryos are matured on rooting medium until roots develop. The rooted shoots are transplanted to potting soil in the greenhouse. T1 seeds are produced from plants that exhibit tolerance to the selection agent and that contain a single copy of the T-DNA insert.

### Example 16

### Cloning of the Nucleic Acid Sequence Used in the Methods of the Invention

[0864] Cloning of SEQ ID NO: 104 (Encoding a GRP, Wherein Said GRP Polypeptide is a Basic-Helix-Loop-Helix 4 (bHLH4) Polypeptide):

[0865] The nucleic acid sequence SEQ ID NO: 104 used in the methods of the invention was amplified by PCR using as template a custom-made Arabidopsis thaliana mixed tissues cDNA library (in pCMV Sport 6.0; Invitrogen, Paisley, UK). PCR was performed using Hifi Taq DNA polymerase in standard conditions, using 200 ng of template in a 50 μl PCR mix. The primers used were prm06763 (SEQ ID NO: 107; sense:

5′ ggggacaagtttgtacaaaaaagcaggcttaaacaatggctccga
cgaatgtt 3′

and prm06764 (SEQ ID NO: 108; reverse, complementary):

5′ ggggaccactttgtacaagaaagctgggttgctgacttcaattcat
ggac 3′,

which include the AttB sites for Gateway recombination. The amplified PCR fragment was purified also using standard methods. The first step of the Gateway procedure, the BP reaction, was then performed, during which the PCR fragment recombines in vivo with the pDONR201 plasmid to produce, according to the Gateway terminology, an “entry clone”. Plasmid pDONR201 was purchased from Invitrogen, as part of the Gateway® technology.

[0866] The entry clone comprising SEQ ID NO: 104 was then used in an LR reaction with a destination vector used for Oryza sativa transformation. This vector contained as functional elements within the T-DNA borders: a plant selectable marker; a screenable marker expression cassette; and a Gateway cassette intended for LR in vivo recombination with the nucleic acid sequence of interest already cloned in the entry clone. A rice HMGB promoter (SEQ ID NO: 106) for constitutive expression was located upstream of this Gateway cassette.

[0867] After the LR recombination step, the resulting expression vector pHMGB::GRP (FIG. 8) was transformed into Agrobacterium strain LBA4044 according to methods well known in the art.

### Example 17

### Plant Transformation

### Rice Transformation

[0868] The Agrobacterium containing the expression vector was used to transform Oryza sativa plants. Mature dry seeds of the rice japonica cultivar Nipponbare were dehusked. Sterilization was carried out by incubating for one minute in 70% ethanol, followed by 30 minutes in 0.2% HgCl₂, followed by a 6 times 15 minutes wash with sterile distilled water. The sterile seeds were then germinated on a medium containing 2,4-D (callus induction medium). After incubation in the dark for four weeks, embryogenic, scutellum-derived calli were excised and propagated on the same medium. After two weeks, the calli were multiplied or propagated by subculture on the same medium for another 2 weeks. Embryogenic callus pieces were sub-cultured on fresh medium 3 days before co-cultivatin (to boost cell division activity).

[0869] Agrobacterium strain LBA4404 containing the expression vector was used for co-cultivation. Agrobacterium was inoculated on AB medium with the appropriate antibiotics and cultured for 3 days at 28° C. The bacteria were then collected and suspended in liquid co-cultivation medium to a density (OD₆₀₀) of about 1. The suspension was then transferred to a Petri dish and the calli immersed in the suspension for 15 minutes. The callus tissues were then blotted dry on a filter paper and transferred to solidified, co-cultivation medium and incubated for 3 days in the dark at 25° C. Co-cultivated calli were grown on 2,4-D-containing medium for 4 weeks in the dark at 28° C. in the presence of a selection agent. During this period, rapidly growing resistant callus islands developed. After transfer of this material to a regeneration medium and incubation in the light, the embryogenic potential was released and shoots developed in the next four to five weeks. Shoots were excised from the calli and incubated for 2 to 3 weeks on an auxin-containing medium from which they were transferred to soil. Hardened shoots were grown under high humidity and short days in a greenhouse.

[0870] Approximately 35 independent T0 rice transformants were generated for one construct. The primary transformants were transferred from a tissue culture chamber to a greenhouse. After a quantitative PCR analysis to verify copy number of the T-DNA insert, only single copy transgenic plants that exhibit tolerance to the selection agent were kept for harvest of T1 seed. Seeds were then harvested three to five months after transplanting. The method yielded single locus transformants at a rate of over 50% (Aldemita and Hodges1996, Chan et al. 1993, Hiei et al. 1994).

### Example 18

### Phenotypic Evaluation Procedure

### 18.1 Evaluation Setup

[0871] Approximately 35 independent T0 rice transformants were generated. The primary transformants were transferred from a tissue culture chamber to a greenhouse for growing and harvest of T1 seed. Five events, of which the T1 progeny segregated 3:1 for presence/absence of the transgene, were retained. For each of these events, approximately 10 T1 seedlings containing the transgene (hetero- and homo-zygotes) and approximately 10 T1 seedlings lacking the transgene (nullizygotes) were selected by monitoring visual marker expression. The transgenic plants and the corresponding nullizygotes were grown side-by-side at random positions. Greenhouse conditions were of shorts days (12 hours light), 28° C. in the light and 22° C. in the dark, and a relative humidity of 70%.

[0872] Four T1 events were further evaluated in the T2 generation following the same evaluation procedure as for the T1 generation but with more individuals per event.

[0873] From the stage of sowing until the stage of maturity the plants were passed several times through a digital imaging cabinet. At each time point digital images (2048×1536 pixels, 16 million colours) were taken of each plant from at least 6 different angles.

### 18.2 Statistical Analysis: F Test

[0874] A two factor ANOVA (analysis of variants) was used as a statistical model for the overall evaluation of plant phenotypic characteristics. An F test was carried out on all the parameters measured of all the plants of all the events transformed with the gene of the present invention. The F test was carried out to check for an effect of the gene over all the transformation events and to verify for an overall effect of the gene, also known as a global gene effect. The threshold for significance for a true global gene effect was set at a 5% probability level for the F test. A significant F test value points to a gene effect, meaning that it is not only the mere presence or position of the gene that is causing the differences in phenotype.

[0875] Because two experiments with overlapping events were carried out, a combined analysis is performed. This is useful to check consistency of the effects over the two experiments, and if this is the case, to accumulate evidence from both experiments in order to increase confidence in the conclusion. The method used is a mixed-model approach that takes into account the multilevel structure of the data (i.e. experiment-event-segregants). P values were obtained by comparing likelihood ratio test to chi square distributions.

### 18.3 Parameters Measured

### Biomass-Related Parameter Measurement

[0876] The plant aboveground area (or leafy biomass) was determined by counting the total number of pixels on the digital images from aboveground plant parts discriminated from the background. This value was averaged for the pictures taken on the same time point from the different angles and was converted to a physical surface value expressed in square mm by calibration. Experiments show that the aboveground plant area measured this way correlates with the biomass of plant parts above ground. The above ground area is the area measured at the time point at which the plant had reached its maximal leafy biomass.

### Seed-Related Parameter Measurements

[0877] The mature primary panicles were harvested, counted, bagged, barcode-labelled and then dried for three days in an oven at 37° C. The panicles were then threshed and all the seeds were collected and counted. The filled husks were separated from the empty ones using an air-blowing device. The empty husks were discarded and the remaining fraction was counted again. The filled husks were weighed on an analytical balance. The number of filled seeds was determined by counting the number of filled husks that remained after the separation step. The total seed yield was measured by weighing all filled husks harvested from a plant. Total seed number per plant was measured by counting the number of husks harvested from a plant. Thousand Kernel Weight (TKW) is extrapolated from the number of filled seeds counted and their total weight. The Harvest Index (HI) in the present invention is defined as the ratio between the total seed yield and the above ground area (mm²), multiplied by a factor 10⁶. The total number of flowers per panicle as defined in the present invention is the ratio between the total number of seeds and the number of mature primary panicles. The seed fill rate as defined in the present invention is the proportion (expressed as a %) of the number of filled seeds over the total number of seeds (or florets).

### Example 19

### Results of the Phenotypic Evaluation of the Transgenic Plants

[0878] The transgenic rice plants expressing the GRP nucleic acid sequence represented by SEQ ID NO: 104 under control of the HMGB promoter showed an increase of more than 5% for total weight of seeds, number of filled seeds, fill rate, and harvest index.

| | Overall average | Average % |
|---|---|---|
| | % increase in | increase in |
| | 5 events in the | 2 events in the |
| | T1 generation | T2 generation |
| Early vigour | 21% | 7% |
| Total seed yield per plant | 23% | 27% |
| Total number of filled seeds | 22% | 28% |
| Seed fill rate | 12% | 15% |
| Harvest index | 18% | 17% |
| Greenness index | 4% | 9% |

### Example 20

### Other Crop Transformation

### Corn Transformation

[0879] Transformation of maize (Zea mays) is performed with a modification of the method described by Ishida et al. (1996) Nature Biotech 14(6): 745-50. Transformation is genotype-dependent in corn and only specific genotypes are amenable to transformation and regeneration. The inbred line A188 (University of Minnesota) or hybrids with A188 as a parent are good sources of donor material for transformation, but other genotypes can be used successfully as well. Ears are harvested from corn plant approximately 11 days after pollination (DAP) when the length of the immature embryo is about 1 to 1.2 mm. Immature embryos are cocultivated with Agrobacterium tumefaciens containing the expression vector, and transgenic plants are recovered through organogenesis. Excised embryos are grown on callus induction medium, then maize regeneration medium, containing the selection agent (for example imidazolinone but various selection markers can be used). The Petri plates are incubated in the light at 25° C. for 2-3 weeks, or until shoots develop. The green shoots are transferred from each embryo to maize rooting medium and incubated at 25° C. for 2-3 weeks, until roots develop. The rooted shoots are transplanted to soil in the greenhouse. T1 seeds are produced from plants that exhibit tolerance to the selection agent and that contain a single copy of the T-DNA insert.

### Wheat Transformation

[0880] Transformation of wheat is performed with the method described by Ishida et al. (1996) Nature Biotech 14(6): 745-50. The cultivar Bobwhite (available from CIMMYT, Mexico) is commonly used in transformation. Immature embryos are co-cultivated with Agrobacterium tumefaciens containing the expression vector, and transgenic plants are recovered through organogenesis. After incubation with Agrobacterium, the embryos are grown in vitro on callus induction medium, then regeneration medium, containing the selection agent (for example imidazolinone but various selection markers can be used). The Petri plates are incubated in the light at 25° C. for 2-3 weeks, or until shoots develop. The green shoots are transferred from each embryo to rooting medium and incubated at 25° C. for 2-3 weeks, until roots develop. The rooted shoots are transplanted to soil in the greenhouse. T1 seeds are produced from plants that exhibit tolerance to the selection agent and that contain a single copy of the T-DNA insert.

### Soybean Transformation

[0881] Soybean is transformed according to a modification of the method described in the Texas A&M U.S. Pat. No. 5,164,310. Several commercial soybean varieties are amenable to transformation by this method. The cultivar Jack (available from the Illinois Seed foundation) is commonly used for transformation. Soybean seeds are sterilised for in vitro sowing. The hypocotyl, the radicle and one cotyledon are excised from seven-day old young seedlings. The epicotyl and the remaining cotyledon are further grown to develop axillary nodes. These axillary nodes are excised and incubated with Agrobacterium tumefaciens containing the expression vector. After the cocultivation treatment, the explants are washed and transferred to selection media. Regenerated shoots are excised and placed on a shoot elongation medium. Shoots no longer than 1 cm are placed on rooting medium until roots develop. The rooted shoots are transplanted to soil in the greenhouse. T1 seeds are produced from plants that exhibit tolerance to the selection agent and that contain a single copy of the T-DNA insert.

### Rapeseed/Canola Transformation

[0882] Cotyledonary petioles and hypocotyls of 5-6 day old young seedling are used as explants for tissue culture and transformed according to Babic et al. (1998, Plant Cell Rep 17: 183-188). The commercial cultivar Westar (Agriculture Canada) is the standard variety used for transformation, but other varieties can also be used. Canola seeds are surface-sterilized for in vitro sowing. The cotyledon petiole explants with the cotyledon attached are excised from the in vitro seedlings, and inoculated with Agrobacterium (containing the expression vector) by dipping the cut end of the petiole explant into the bacterial suspension. The explants are then cultured for 2 days on MSBAP-3 medium containing 3 mg/l BAP, 3% sucrose, 0.7% Phytagar at 23° C., 16 hr light. After two days of co-cultivation with Agrobacterium, the petiole explants are transferred to MSBAP-3 medium containing 3 mg/l BAP, cefotaxime, carbenicillin, or timentin (300 mg/l) for 7 days, and then cultured on MSBAP-3 medium with cefotaxime, carbenicillin, or timentin and selection agent until shoot regeneration. When the shoots are 5-10 mm in length, they are cut and transferred to shoot elongation medium (MSBAP-0.5, containing 0.5 mg/l BAP). Shoots of about 2 cm in length are transferred to the rooting medium (MS0) for root induction. The rooted shoots are transplanted to soil in the greenhouse. T1 seeds are produced from plants that exhibit tolerance to the selection agent and that contain a single copy of the T-DNA insert.

### Alfalfa Transformation

[0883] A regenerating clone of alfalfa (Medicago sativa) is transformed using the method of (McKersie et al., 1999 Plant Physiol 119: 839-847). Regeneration and transformation of alfalfa is genotype dependent and therefore a regenerating plant is required. Methods to obtain regenerating plants have been described. For example, these can be selected from the cultivar Rangelander (Agriculture Canada) or any other commercial alfalfa variety as described by Brown DCW and A Atanassov (1985. Plant Cell Tissue Organ Culture 4: 111-112). Alternatively, the RA3 variety (University of Wisconsin) has been selected for use in tissue culture (Walker et al., 1978 Am J Bot 65:654-659). Petiole explants are cocultivated with an overnight culture of Agrobacterium tumefaciens C58C1 pMP90 (McKersie et al., 1999 Plant Physiol 119: 839-847) or LBA4404 containing the expression vector. The explants are cocultivated for 3 d in the dark on SH induction medium containing 288 mg/L Pro, 53 mg/L thioproline, 4.35 g/L K2SO4, and 100 μm acetosyringinone. The explants are washed in half-strength Murashige-Skoog medium (Murashige and Skoog, 1962) and plated on the same SH induction medium without acetosyringinone but with a suitable selection agent and suitable antibiotic to inhibit Agrobacterium growth. After several weeks, somatic embryos are transferred to BOi2Y development medium containing no growth regulators, no antibiotics, and 50 g/L sucrose. Somatic embryos are subsequently germinated on half-strength Murashige-Skoog medium. Rooted seedlings were transplanted into pots and grown in a greenhouse. T1 seeds are produced from plants that exhibit tolerance to the selection agent and that contain a single copy of the T-DNA insert.

### Cotton Transformation

[0884] Cotton (Gossypium hirsutum L.) transformation is performed using Agrobacterium tumefaciens, on hypocotyls explants. The commercial cultivars such as Coker 130 or Coker 312 (SeedCo, Lubbock, Tex.) are standard varieties used for transformation, but other varieties can also be used. The seeds are surface sterilized and germinated in the dark. Hypocotyl explants are cut from the germinated seedlings to lengths of about 1-1.5 centimeter. The hypotocyl explant is submersed in the Agrobacterium tumefaciens inoculum containing the expression vector, for 5 minutes then co-cultivated for about 48 hours on MS+1.8 mg/l KNO3+2% glucose at 24° C., in the dark. The explants are transferred the same medium containing appropriate bacterial and plant selectable markers (renewed several times), until embryogenic calli is seen. The calli are separated and subcultured until somatic embryos appear. Plantlets derived from the somatic embryos are matured on rooting medium until roots develop. The rooted shoots are transplanted to potting soil in the greenhouse. T1 seeds are produced from plants that exhibit tolerance to the selection agent and that contain a single copy of the T-DNA insert.

### Example 21

### Abiotic Stress Screens

### Drought Screen

[0885] Rice plants from T1, T2 or further generations are grown in potting soil under normal conditions until they approached the heading stage. They are then transferred to a “dry” section where irrigation is withheld. Humidity probes are inserted in randomly chosen pots to monitor the soil water content (SWC). When SWC goes below certain thresholds, the plants are automatically re-watered continuously until a normal level is reached again. The plants are then re-transferred again to normal conditions. The rest of the cultivation (plant maturation, seed harvest) is the same as for plants not grown under abiotic stress conditions. Growth and yield parameters are recorded as detailed for growth under normal conditions.

### Salt Stress Screen

[0886] Rice plants from T1, T2 or further generations are grown on a substrate made of coco fibers and argex (3 to 1 ratio). A normal nutrient solution is used during the first two weeks after transplanting the plantlets in the greenhouse. After the first two weeks, 25 mM of salt (NaCl) is added to the nutrient solution, until the plants are harvested. Growth and yield parameters are recorded as detailed for growth under normal conditions.

### Nitrogen Use Efficiency Screen

[0887] Rice plants from T1, T2 or further generations are grown in potting soil under normal conditions except for the nutrient solution. The pots are watered from transplantation to maturation with a specific nutrient solution containing reduced N nitrogen (N) content, usually between 7 to 8 times less. The rest of the cultivation (plant maturation, seed harvest) is the same as for plants not grown under abiotic stress. Growth and yield parameters are recorded as detailed for growth under normal conditions.

### Example 22

### Cloning of the Nucleic Acid Sequence Used in the Methods of the Invention

### Cloning of SEQ ID NO: 131 (Encoding a GRP, Wherein Said GRP Polypeptide is an Isopentenyl Transferase (IPT) Polypeptide):

[0888] The nucleic acid sequence SEQ ID NO: 131 used in the methods of the invention was amplified by PCR using as template a custom-made Arabidopsis thaliana mixed tissues cDNA library (in pCMV Sport 6.0; Invitrogen, Paisley, UK). PCR was performed using Hifi Taq DNA polymerase in standard conditions, using 200 ng of template in a 50 μl PCR mix. The primers used were prm03095 (SEQ ID NO: 134; sense:

5′ ggggacaagtttgtacaaaaaagcaggcttcacaatgacagaactc
aacttccac 3′

and prm03096 (SEQ ID NO: 135; reverse, complementary):

5′ ggggaccactttgtacaagaaagctgggtaactaattttgcaccaa
atg 3′,

which include the AttB sites for Gateway recombination. The amplified PCR fragment was purified also using standard methods. The first step of the Gateway procedure, the BP reaction, was then performed, during which the PCR fragment recombines in vivo with the pDONR201 plasmid to produce, according to the Gateway terminology, an “entry clone”. Plasmid pDONR201 was purchased from Invitrogen, as part of the Gateway® technology.

[0889] The entry clone comprising SEQ ID NO: 131 was then used in an LR reaction with a destination vector used for Oryza sativa transformation. This vector contained as functional elements within the T-DNA borders: a plant selectable marker; a screenable marker expression cassette; and a Gateway cassette intended for LR in vivo recombination with the nucleic acid sequence of interest already cloned in the entry clone. A rice prolamin promoter (SEQ ID NO: 133) for seed-specific expression was located upstream of this Gateway cassette.

[0890] After the LR recombination step, the resulting expression vector pProl::GRP (FIG. 11) was transformed into Agrobacterium strain LBA4044 according to methods well known in the art.

### Example 23

### Plant Transformation

### Rice Transformation

[0891] The Agrobacterium containing the expression vector was used to transform Oryza sativa plants. Mature dry seeds of the rice japonica cultivar Nipponbare were dehusked. Sterilization was carried out by incubating for one minute in 70% ethanol, followed by 30 minutes in 0.2% HgCl₂, followed by a 6 times 15 minutes wash with sterile distilled water. The sterile seeds were then germinated on a medium containing 2,4-D (callus induction medium). After incubation in the dark for four weeks, embryogenic, scutellum-derived calli were excised and propagated on the same medium. After two weeks, the calli were multiplied or propagated by subculture on the same medium for another 2 weeks. Embryogenic callus pieces were sub-cultured on fresh medium 3 days before co-cultivatin (to boost cell division activity).

[0892] Agrobacterium strain LBA4404 containing the expression vector was used for co-cultivation. Agrobacterium was inoculated on AB medium with the appropriate antibiotics and cultured for 3 days at 28° C. The bacteria were then collected and suspended in liquid co-cultivation medium to a density (OD₆₀₀) of about 1. The suspension was then transferred to a Petri dish and the calli immersed in the suspension for 15 minutes. The callus tissues were then blotted dry on a filter paper and transferred to solidified, co-cultivation medium and incubated for 3 days in the dark at 25° C. Co-cultivated calli were grown on 2,4-D-containing medium for 4 weeks in the dark at 28° C. in the presence of a selection agent. During this period, rapidly growing resistant callus islands developed. After transfer of this material to a regeneration medium and incubation in the light, the embryogenic potential was released and shoots developed in the next four to five weeks. Shoots were excised from the calli and incubated for 2 to 3 weeks on an auxin-containing medium from which they were transferred to soil. Hardened shoots were grown under high humidity and short days in a greenhouse.

[0893] Approximately 35 independent T0 rice transformants were generated for one construct. The primary transformants were transferred from a tissue culture chamber to a greenhouse. After a quantitative PCR analysis to verify copy number of the T-DNA insert, only single copy transgenic plants that exhibit tolerance to the selection agent were kept for harvest of T1 seed. Seeds were then harvested three to five months after transplanting. The method yielded single locus transformants at a rate of over 50% (Aldemita and Hodges 1996, Chan et al. 1993, Hiei et al. 1994).

### Example 24

### Phenotypic Evaluation Procedure

### 24.1 Evaluation Setup

[0894] Approximately 35 independent T0 rice transformants were generated. The primary transformants were transferred from a tissue culture chamber to a greenhouse for growing and harvest of T1 seed. Six events, of which the T1 progeny segregated 3:1 for presence/absence of the transgene, were retained. For each of these events, approximately 10 T1 seedlings containing the transgene (hetero- and homo-zygotes) and approximately 10 T1 seedlings lacking the transgene (nullizygotes) were selected by monitoring visual marker expression. The transgenic plants and the corresponding nullizygotes were grown side-by-side at random positions. Greenhouse conditions were of shorts days (12 hours light), 28° C. in the light and 22° C. in the dark, and a relative humidity of 70%.

[0895] Four T1 events were further evaluated in the T2 generation following the same evaluation procedure as for the T1 generation but with more individuals per event.

[0896] From the stage of sowing until the stage of maturity the plants were passed several times through a digital imaging cabinet. At each time point digital images (2048×1536 pixels, 16 million colours) were taken of each plant from at least 6 different angles.

### 24.2 Statistical Analysis: F Test

[0897] A two factor ANOVA (analysis of variants) was used as a statistical model for the overall evaluation of plant phenotypic characteristics. An F test was carried out on all the parameters measured of all the plants of all the events transformed with the gene of the present invention. The F test was carried out to check for an effect of the gene over all the transformation events and to verify for an overall effect of the gene, also known as a global gene effect. The threshold for significance for a true global gene effect was set at a 5% probability level for the F test. A significant F test value points to a gene effect, meaning that it is not only the mere presence or position of the gene that is causing the differences in phenotype.

[0898] Because two experiments with overlapping events were carried out, a combined analysis is performed. This is useful to check consistency of the effects over the two experiments, and if this is the case, to accumulate evidence from both experiments in order to increase confidence in the conclusion. The method used is a mixed-model approach that takes into account the multilevel structure of the data (i.e. experiment-event-segregants). P values were obtained by comparing likelihood ratio test to chi square distributions.

### 24.3 Parameters Measured

### Biomass-Related Parameter Measurement

[0899] The plant aboveground area (or leafy biomass) was determined by counting the total number of pixels on the digital images from aboveground plant parts discriminated from the background. This value was averaged for the pictures taken on the same time point from the different angles and was converted to a physical surface value expressed in square mm by calibration. Experiments show that the aboveground plant area measured this way correlates with the biomass of plant parts above ground. The above ground area is the area measured at the time point at which the plant had reached its maximal leafy biomass.

### Seed-Related Parameter Measurements

[0900] The mature primary panicles were harvested, counted, bagged, barcode-labelled and then dried for three days in an oven at 37° C. The panicles were then threshed and all the seeds were collected and counted. The filled husks were separated from the empty ones using an air-blowing device. The empty husks were discarded and the remaining fraction was counted again. The filled husks were weighed on an analytical balance. The number of filled seeds was determined by counting the number of filled husks that remained after the separation step. The total seed yield was measured by weighing all filled husks harvested from a plant. Total seed number per plant was measured by counting the number of husks harvested from a plant. Thousand Kernel Weight (TKW) is extrapolated from the number of filled seeds counted and their total weight. The Harvest Index (HI) in the present invention is defined as the ratio between the total seed yield and the above ground area (mm²), multiplied by a factor 10⁶. The total number of flowers per panicle as defined in the present invention is the ratio between the total number of seeds and the number of mature primary panicles. The seed fill rate as defined in the present invention is the proportion (expressed as a %) of the number of filled seeds over the total number of seeds (or florets).

### Example 25

### Results of the Phenotypic Evaluation of the Transgenic Plants

[0901] The transgenic rice plants expressing the GRP nucleic acid sequence represented by SEQ ID NO: 131 under control of the prolamin promoter showed an increase of more than 5% for total seed yield per plant, number of filled seeds, total number of seeds, and harvest index.

| | Overall average % | Average % increase in |
|---|---|---|
| | increase in 4 events in | 4 events in the T2 |
| | the T1 generation | generation |
| Total seed yield per plant | 19% | 14% |
| Number of filled seeds | 20% | 16% |
| Total number of seeds | 16% | 8% |
| Harvest index | 9% | 15% |

### Example 26

### Other Crop Transformation

### Corn Transformation

[0902] Transformation of maize (Zea mays) is performed with a modification of the method described by Ishida et al. (1996) Nature Biotech 14(6): 745-50. Transformation is genotype-dependent in corn and only specific genotypes are amenable to transformation and regeneration. The inbred line A188 (University of Minnesota) or hybrids with A188 as a parent are good sources of donor material for transformation, but other genotypes can be used successfully as well. Ears are harvested from corn plant approximately 11 days after pollination (DAP) when the length of the immature embryo is about 1 to 1.2 mm. Immature embryos are cocultivated with Agrobacterium tumefaciens containing the expression vector, and transgenic plants are recovered through organogenesis. Excised embryos are grown on callus induction medium, then maize regeneration medium, containing the selection agent (for example imidazolinone but various selection markers can be used). The Petri plates are incubated in the light at 25° C. for 2-3 weeks, or until shoots develop. The green shoots are transferred from each embryo to maize rooting medium and incubated at 25° C. for 2-3 weeks, until roots develop. The rooted shoots are transplanted to soil in the greenhouse. T1 seeds are produced from plants that exhibit tolerance to the selection agent and that contain a single copy of the T-DNA insert.

### Wheat Transformation

[0903] Transformation of wheat is performed with the method described by Ishida et al. (1996) Nature Biotech 14(6): 745-50. The cultivar Bobwhite (available from CIMMYT, Mexico) is commonly used in transformation. Immature embryos are co-cultivated with Agrobacterium tumefaciens containing the expression vector, and transgenic plants are recovered through organogenesis. After incubation with Agrobacterium, the embryos are grown in vitro on callus induction medium, then regeneration medium, containing the selection agent (for example imidazolinone but various selection markers can be used). The Petri plates are incubated in the light at 25° C. for 2-3 weeks, or until shoots develop. The green shoots are transferred from each embryo to rooting medium and incubated at 25° C. for 2-3 weeks, until roots develop. The rooted shoots are transplanted to soil in the greenhouse. T1 seeds are produced from plants that exhibit tolerance to the selection agent and that contain a single copy of the T-DNA insert.

### Soybean Transformation

[0904] Soybean is transformed according to a modification of the method described in the Texas A&M U.S. Pat. No. 5,164,310. Several commercial soybean varieties are amenable to transformation by this method. The cultivar Jack (available from the Illinois Seed foundation) is commonly used for transformation. Soybean seeds are sterilised for in vitro sowing. The hypocotyl, the radicle and one cotyledon are excised from seven-day old young seedlings. The epicotyl and the remaining cotyledon are further grown to develop axillary nodes. These axillary nodes are excised and incubated with Agrobacterium tumefaciens containing the expression vector. After the cocultivation treatment, the explants are washed and transferred to selection media. Regenerated shoots are excised and placed on a shoot elongation medium. Shoots no longer than 1 cm are placed on rooting medium until roots develop. The rooted shoots are transplanted to soil in the greenhouse. T1 seeds are produced from plants that exhibit tolerance to the selection agent and that contain a single copy of the T-DNA insert.

[0905] Rapeseed/Canola Transformation

[0906] Cotyledonary petioles and hypocotyls of 5-6 day old young seedling are used as explants for tissue culture and transformed according to Babic et al. (1998, Plant Cell Rep 17: 183-188). The commercial cultivar Westar (Agriculture Canada) is the standard variety used for transformation, but other varieties can also be used. Canola seeds are surface-sterilized for in vitro sowing. The cotyledon petiole explants with the cotyledon attached are excised from the in vitro seedlings, and inoculated with Agrobacterium (containing the expression vector) by dipping the cut end of the petiole explant into the bacterial suspension. The explants are then cultured for 2 days on MSBAP-3 medium containing 3 mg/l BAP, 3% sucrose, 0.7% Phytagar at 23° C., 16 hr light. After two days of co-cultivation with Agrobacterium, the petiole explants are transferred to MSBAP-3 medium containing 3 mg/l BAP, cefotaxime, carbenicillin, or timentin (300 mg/l) for 7 days, and then cultured on MSBAP-3 medium with cefotaxime, carbenicillin, or timentin and selection agent until shoot regeneration. When the shoots are 5-10 mm in length, they are cut and transferred to shoot elongation medium (MSBAP-0.5, containing 0.5 mg/l BAP). Shoots of about 2 cm in length are transferred to the rooting medium (MS0) for root induction. The rooted shoots are transplanted to soil in the greenhouse. T1 seeds are produced from plants that exhibit tolerance to the selection agent and that contain a single copy of the T-DNA insert.

### Alfalfa Transformation

[0907] A regenerating clone of alfalfa (Medicago sativa) is transformed using the method of (McKersie et al., 1999 Plant Physiol 119: 839-847). Regeneration and transformation of alfalfa is genotype dependent and therefore a regenerating plant is required. Methods to obtain regenerating plants have been described. For example, these can be selected from the cultivar Rangelander (Agriculture Canada) or any other commercial alfalfa variety as described by

[0908] Brown DCW and A Atanassov (1985. Plant Cell Tissue Organ Culture 4: 111-112). Alternatively, the RA3 variety (University of Wisconsin) has been selected for use in tissue culture (Walker et al., 1978 Am J Bot 65:654-659). Petiole explants are cocultivated with an overnight culture of Agrobacterium tumefaciens C58C1 pMP90 (McKersie et al., 1999 Plant Physiol 119: 839-847) or LBA4404 containing the expression vector. The explants are cocultivated for 3 d in the dark on SH induction medium containing 288 mg/L Pro, 53 mg/L thioproline, 4.35 g/L K2SO4, and 100 μm acetosyringinone. The explants are washed in half-strength Murashige-Skoog medium (Murashige and Skoog, 1962) and plated on the same SH induction medium without acetosyringinone but with a suitable selection agent and suitable antibiotic to inhibit Agrobacterium growth. After several weeks, somatic embryos are transferred to BOi2Y development medium containing no growth regulators, no antibiotics, and 50 g/L sucrose. Somatic embryos are subsequently germinated on half-strength Murashige-Skoog medium. Rooted seedlings were transplanted into pots and grown in a greenhouse. T1 seeds are produced from plants that exhibit tolerance to the selection agent and that contain a single copy of the T-DNA insert.

### Cotton Transformation

[0909] Cotton (Gossypium hirsutum L.) transformation is performed using Agrobacterium tumefaciens, on hypocotyls explants. The commercial cultivars such as Coker 130 or Coker 312 (SeedCo, Lubbock, Tex.) are standard varieties used for transformation, but other varieties can also be used. The seeds are surface sterilized and germinated in the dark. Hypocotyl explants are cut from the germinated seedlings to lengths of about 1-1.5 centimeter. The hypotocyl explant is submersed in the Agrobacterium tumefaciens inoculum containing the expression vector, for 5 minutes then co-cultivated for about 48 hours on MS+1.8 mg/l KNO3+2% glucose at 24° C., in the dark. The explants are transferred the same medium containing appropriate bacterial and plant selectable markers (renewed several times), until embryogenic calli is seen. The calli are separated and subcultured until somatic embryos appear. Plantlets derived from the somatic embryos are matured on rooting medium until roots develop. The rooted shoots are transplanted to potting soil in the greenhouse. T1 seeds are produced from plants that exhibit tolerance to the selection agent and that contain a single copy of the T-DNA insert.

### Example 27

### Abiotic Stress Screens

### Drought Screen

[0910] Rice plants from T1, T2 or further generations are grown in potting soil under normal conditions until they approached the heading stage. They are then transferred to a “dry” section where irrigation is withheld. Humidity probes are inserted in randomly chosen pots to monitor the soil water content (SWC). When SWC goes below certain thresholds, the plants are automatically re-watered continuously until a normal level is reached again. The plants are then re-transferred again to normal conditions. The rest of the cultivation (plant maturation, seed harvest) is the same as for plants not grown under abiotic stress conditions. Growth and yield parameters are recorded as detailed for growth under normal conditions.

### Salt Stress Screen

[0911] Rice plants from T1, T2 or further generations are grown on a substrate made of coco fibers and argex (3 to 1 ratio). A normal nutrient solution is used during the first two weeks after transplanting the plantlets in the greenhouse. After the first two weeks, 25 mM of salt (NaCl) is added to the nutrient solution, until the plants are harvested. Growth and yield parameters are recorded as detailed for growth under normal conditions.

### Nitrogen Use Efficiency Screen

[0912] Rice plants from T1, T2 or further generations are grown in potting soil under normal conditions except for the nutrient solution. The pots are watered from transplantation to maturation with a specific nutrient solution containing reduced N nitrogen (N) content, usually between 7 to 8 times less. The rest of the cultivation (plant maturation, seed harvest) is the same as for plants not grown under abiotic stress. Growth and yield parameters are recorded as detailed for growth under normal conditions.

### Example 28

### Cloning of the Nucleic Acid Sequence Used in the Methods of the Invention, Coding for an STO (Salt Tolerance) Protein

[0913] The nucleic acid sequence used in the methods of the invention was amplified by PCR using as template a custom-made Oryza sativa seedlings cDNA library (in pCMV Sport 6.0; Invitrogen, Paisley, UK). PCR was performed using Hifi Taq DNA polymerase in standard conditions, using 200 ng of template in a 50 μl PCR mix. The primers used were prm1-STO (SEQ ID NO: 216; sense, start codon in bold):

5′-ggggacaagtttgtacaaaaaagcaggcttaaacaatgaaggtgcag
tgcga-3′

and prm2-STO (SEQ ID NO: 217; reverse, complementary):

5′-ggggacactttgtacaagaaagctgggttcaccagtacaagcagg
gag 3′,

which include the AttB sites for Gateway recombination. The amplified PCR fragment was purified also using standard methods. The first step of the Gateway procedure, the BP reaction, was then performed, during which the PCR fragment recombines in vivo with the pDONR201 plasmid to produce, according to the Gateway terminology, an “entry clone”, pSTO. Plasmid pDONR201 was purchased from Invitrogen, as part of the Gateway® technology.

[0914] The entry clone comprising SEQ ID NO: 168 was then used in an LR reaction with a destination vector used for Oryza sativa transformation. This vector contained as functional elements within the T-DNA borders: a plant selectable marker; a screenable marker expression cassette; and a Gateway cassette intended for LR in vivo recombination with the nucleic acid sequence of interest already cloned in the entry clone. A rice GOS2 promoter (SEQ ID NO: 218) for root specific expression was located upstream of this Gateway cassette.

[0915] After the LR recombination step, the resulting expression vector pGOS2::STO (FIG. 17) was transformed into Agrobacterium strain LBA4044 according to methods well known in the art.

### Example 29

### Plant Transformation

### Rice Transformation

[0916] The Agrobacterium containing the expression vector was used to transform Oryza sativa plants. Mature dry seeds of the rice japonica cultivar Nipponbare were dehusked. Sterilization was carried out by incubating for one minute in 70% ethanol, followed by 30 minutes in 0.2% HgCl₂, followed by a 6 times 15 minutes wash with sterile distilled water. The sterile seeds were then germinated on a medium containing 2,4-D (callus induction medium). After incubation in the dark for four weeks, embryogenic, scutellum-derived calli were excised and propagated on the same medium. After two weeks, the calli were multiplied or propagated by subculture on the same medium for another 2 weeks. Embryogenic callus pieces were sub-cultured on fresh medium 3 days before co-cultivation (to boost cell division activity).

[0917] Agrobacterium strain LBA4404 containing the expression vector was used for co-cultivation. Agrobacterium was inoculated on AB medium with the appropriate antibiotics and cultured for 3 days at 28° C. The bacteria were then collected and suspended in liquid co-cultivation medium to a density (OD₆₀₀) of about 1. The suspension was then transferred to a Petri dish and the calli immersed in the suspension for 15 minutes. The callus tissues were then blotted dry on a filter paper and transferred to solidified, co-cultivation medium and incubated for 3 days in the dark at 25° C. Co-cultivated calli were grown on 2,4-D-containing medium for 4 weeks in the dark at 28° C. in the presence of a selection agent. During this period, rapidly growing resistant callus islands developed. After transfer of this material to a regeneration medium and incubation in the light, the embryogenic potential was released and shoots developed in the next four to five weeks. Shoots were excised from the calli and incubated for 2 to 3 weeks on an auxin-containing medium from which they were transferred to soil. Hardened shoots were grown under high humidity and short days in a greenhouse.

[0918] Approximately 35 independent T0 rice transformants were generated for one construct. The primary transformants were transferred from a tissue culture chamber to a greenhouse. After a quantitative PCR analysis to verify copy number of the T-DNA insert, only single copy transgenic plants that exhibit tolerance to the selection agent were kept for harvest of T1 seed. Seeds were then harvested three to five months after transplanting. The method yielded single locus transformants at a rate of over 50% (Aldemita and Hodges1996, Chan et al. 1993, Hiei et al. 1994).

### Corn Transformation

[0919] Transformation of maize (Zea mays) is performed with a modification of the method described by Ishida et al. (1996) Nature Biotech 14(6): 745-50. Transformation is genotype-dependent in corn and only specific genotypes are amenable to transformation and regeneration. The inbred line A188 (University of Minnesota) or hybrids with A188 as a parent are good sources of donor material for transformation, but other genotypes can be used successfully as well. Ears are harvested from corn plant approximately 11 days after pollination (DAP) when the length of the immature embryo is about 1 to 1.2 mm. Immature embryos are cocultivated with Agrobacterium tumefaciens containing the expression vector, and transgenic plants are recovered through organogenesis. Excised embryos are grown on callus induction medium, then maize regeneration medium, containing the selection agent (for example imidazolinone but various selection markers can be used). The Petri plates are incubated in the light at 25° C. for 2-3 weeks, or until shoots develop. The green shoots are transferred from each embryo to maize rooting medium and incubated at 25° C. for 2-3 weeks, until roots develop. The rooted shoots are transplanted to soil in the greenhouse. T1 seeds are produced from plants that exhibit tolerance to the selection agent and that contain a single copy of the T-DNA insert.

### Wheat Transformation

[0920] Transformation of wheat is performed with the method described by Ishida et al. (1996) Nature Biotech 14(6): 745-50. The cultivar Bobwhite (available from CIMMYT, Mexico) is commonly used in transformation. Immature embryos are co-cultivated with Agrobacterium tumefaciens containing the expression vector, and transgenic plants are recovered through organogenesis. After incubation with Agrobacterium, the embryos are grown in vitro on callus induction medium, then regeneration medium, containing the selection agent (for example imidazolinone but various selection markers can be used). The Petri plates are incubated in the light at 25° C. for 2-3 weeks, or until shoots develop. The green shoots are transferred from each embryo to rooting medium and incubated at 25° C. for 2-3 weeks, until roots develop. The rooted shoots are transplanted to soil in the greenhouse. T1 seeds are produced from plants that exhibit tolerance to the selection agent and that contain a single copy of the T-DNA insert.

### Soybean Transformation

[0921] Soybean is transformed according to a modification of the method described in the Texas A&M U.S. Pat. No. 5,164,310. Several commercial soybean varieties are amenable to transformation by this method. The cultivar Jack (available from the Illinois Seed foundation) is commonly used for transformation. Soybean seeds are sterilised for in vitro sowing. The hypocotyl, the radicle and one cotyledon are excised from seven-day old young seedlings. The epicotyl and the remaining cotyledon are further grown to develop axillary nodes. These axillary nodes are excised and incubated with Agrobacterium tumefaciens containing the expression vector. After the cocultivation treatment, the explants are washed and transferred to selection media. Regenerated shoots are excised and placed on a shoot elongation medium. Shoots no longer than 1 cm are placed on rooting medium until roots develop. The rooted shoots are transplanted to soil in the greenhouse. T1 seeds are produced from plants that exhibit tolerance to the selection agent and that contain a single copy of the T-DNA insert.

### Rapeseed/Canola Transformation

[0922] Cotyledonary petioles and hypocotyls of 5-6 day old young seedling are used as explants for tissue culture and transformed according to Babic et al. (1998, Plant Cell Rep 17: 183-188). The commercial cultivar Westar (Agriculture Canada) is the standard variety used for transformation, but other varieties can also be used. Canola seeds are surface-sterilized for in vitro sowing. The cotyledon petiole explants with the cotyledon attached are excised from the in vitro seedlings, and inoculated with Agrobacterium (containing the expression vector) by dipping the cut end of the petiole explant into the bacterial suspension. The explants are then cultured for 2 days on MSBAP-3 medium containing 3 mg/l BAP, 3% sucrose, 0.7% Phytagar at 23° C., 16 hr light. After two days of co-cultivation with Agrobacterium, the petiole explants are transferred to MSBAP-3 medium containing 3 mg/l BAP, cefotaxime, carbenicillin, or timentin (300 mg/l) for 7 days, and then cultured on MSBAP-3 medium with cefotaxime, carbenicillin, or timentin and selection agent until shoot regeneration. When the shoots are 5-10 mm in length, they are cut and transferred to shoot elongation medium (MSBAP-0.5, containing 0.5 mg/l BAP). Shoots of about 2 cm in length are transferred to the rooting medium (MS0) for root induction. The rooted shoots are transplanted to soil in the greenhouse. T1 seeds are produced from plants that exhibit tolerance to the selection agent and that contain a single copy of the T-DNA insert.

### Alfalfa Transformation

[0923] A regenerating clone of alfalfa (Medicago sativa) is transformed using the method of (McKersie et al., 1999 Plant Physiol 119: 839-847). Regeneration and transformation of alfalfa is genotype dependent and therefore a regenerating plant is required. Methods to obtain regenerating plants have been described. For example, these can be selected from the cultivar Rangelander (Agriculture Canada) or any other commercial alfalfa variety as described by Brown DCW and A Atanassov (1985. Plant Cell Tissue Organ Culture 4: 111-112). Alternatively, the RA3 variety (University of Wisconsin) has been selected for use in tissue culture (Walker et al., 1978 Am J Bot 65:654-659). Petiole explants are cocultivated with an overnight culture of Agrobacterium tumefaciens C58C1 pMP90 (McKersie et al., 1999 Plant Physiol 119: 839-847) or LBA4404 containing the expression vector. The explants are cocultivated for 3 d in the dark on SH induction medium containing 288 mg/L Pro, 53 mg/L thioproline, 4.35 g/L K2SO4, and 100 μm acetosyringinone. The explants are washed in half-strength Murashige-Skoog medium (Murashige and Skoog, 1962) and plated on the same SH induction medium without acetosyringinone but with a suitable selection agent and suitable antibiotic to inhibit Agrobacterium growth. After several weeks, somatic embryos are transferred to BOi2Y development medium containing no growth regulators, no antibiotics, and 50 g/L sucrose. Somatic embryos are subsequently germinated on half-strength Murashige-Skoog medium. Rooted seedlings were transplanted into pots and grown in a greenhouse. T1 seeds are produced from plants that exhibit tolerance to the selection agent and that contain a single copy of the T-DNA insert.

### Example 30

### Phenotypic Evaluation Procedure

### 30.1 Evaluation Setup

[0924] Approximately 35 independent T0 rice transformants were generated. The primary transformants were transferred from a tissue culture chamber to a greenhouse for growing and harvest of T1 seed. Six events, of which the T1 progeny segregated 3:1 for presence/absence of the transgene, were retained. For each of these events, approximately 10 T1 seedlings containing the transgene (hetero- and homo-zygotes) and approximately 10 T1 seedlings lacking the transgene (nullizygotes) were selected by monitoring visual marker expression. The transgenic plants and the corresponding nullizygotes were grown side-by-side at random positions. Greenhouse conditions were of shorts days (12 hours light), 28° C. in the light and 22° C. in the dark, and a relative humidity of 70%.

[0925] Four T1 events were further evaluated in the T2 generation following the same evaluation procedure as for the T1 generation but with more individuals per event. From the stage of sowing until the stage of maturity the plants were passed several times through a digital imaging cabinet. At each time Point digital images (2048×1536 pixels, 16 million colours) were taken of each plant from at least 6 different angles.

### Drought Screen

[0926] Plants from T2 seeds were grown in potting soil under normal conditions until they approached the heading stage. They were then transferred to a “dry” section where irrigation was withheld. Humidity probes were inserted in randomly chosen pots to monitor the soil water content (SWC). When SWC went below certain thresholds, the plants were automatically re-watered continuously until a normal level was reached again. The plants were then re-transferred again to normal conditions. The rest of the cultivation (plant maturation, seed harvest) was the same as for plants not grown under abiotic stress conditions. Growth and yield parameters were recorded as detailed for growth under normal conditions.

### Nitrogen Use Efficiency Screen

[0927] Rice plants from T2 seeds were grown in potting soil under normal conditions except for the nutrient solution. The pots were watered from transplantation to maturation with a specific nutrient solution containing reduced N nitrogen (N) content, usually between 7 to 8 times less. The rest of the cultivation (plant maturation, seed harvest) was the same as for plants not grown under abiotic stress. Growth and yield parameters are recorded as detailed for growth under normal conditions.

### 30.2 Statistical Analysis: F Test

[0928] A two factor ANOVA (analysis of variants) was used as a statistical model for the overall evaluation of plant phenotypic characteristics. An F test was carried out on all the parameters measured of all the plants of all the events transformed with the gene of the present invention. The F test was carried out to check for an effect of the gene over all the transformation events and to verify for an overall effect of the gene, also known as a global gene effect. The threshold for significance for a true global gene effect was set at a 5% probability level for the F test. A significant F test value Points to a gene effect, meaning that it is not only the mere presence or position of the gene that is causing the differences in phenotype.

[0929] Because two experiments with overlapping events were carried out, a combined analysis was performed. This is useful to check consistency of the effects over the two experiments, and if this is the case, to accumulate evidence from both experiments in order to increase confidence in the conclusion. The method used was a mixed-model approach that takes into account the multilevel structure of the data (i.e. experiment-event-segregants). P values were obtained by comparing likelihood ratio test to chi square distributions.

### 30.3 Parameters Measured

### Biomass-Related Parameter Measurement

[0930] From the stage of sowing until the stage of maturity the plants were passed several times through a digital imaging cabinet. At each time Point digital images (2048×1536 pixels, 16 million colours) were taken of each plant from at least 6 different angles.

[0931] The plant aboveground area (or leafy biomass) was determined by counting the total number of pixels on the digital images from aboveground plant parts discriminated from the background. This value was averaged for the pictures taken on the same time Point from the different angles and was converted to a physical surface value expressed in square mm by calibration. Experiments show that the aboveground plant area measured this way correlates with the biomass of plant parts above ground. The above ground area is the area measured at the time Point at which the plant had reached its maximal leafy biomass. The early vigour is the plant (seedling) aboveground area three weeks post-germination. Increase in root biomass is expressed as an increase in total root biomass (measured as maximum biomass of roots observed during the lifespan of a plant); or as an increase in the root/shoot index (measured as the ratio between root mass and shoot mass in the period of active growth of root and shoot).

[0932] Early vigour was determined by counting the total number of pixels from aboveground plant parts discriminated from the background. This value was averaged for the pictures taken on the same time Point from different angles and was converted to a physical surface value expressed in square mm by calibration. The results described below are for plants three weeks post-germination.

[0933] Flowering time was calculated as previously described (PCT/EP2007/001422). Briefly, the time elapsed between sowing and the moment when the first panicle appeared in the plant was calculated. Appearance of the first panicle refers the point in time when the panicle is visible and detectable in the photographic images of the plants processed as described in (PCT/EP2007/001422).

### Seed-Related Parameter Measurements

[0934] The mature primary panicles were harvested, counted, bagged, barcode-labelled and then dried for three days in an oven at 37° C. The panicles were then threshed and all the seeds were collected and counted. The filled husks were separated from the empty ones using an air-blowing device. The empty husks were discarded and the remaining fraction was counted again. The filled husks were weighed on an analytical balance. The number of filled seeds was determined by counting the number of filled husks that remained after the separation step.

[0935] The total seed yield was measured by weighing all filled husks harvested from a plant. Total seed number per plant was measured by counting the number of husks harvested from a plant. Thousand Kernel Weight (TKW) is extrapolated from the number of filled seeds counted and their total weight. The Harvest Index (HI) in the present invention is defined as the ratio between the total seed yield and the above ground area (mm²), multiplied by a factor 10⁶. The total number of flowers per panicle as defined in the present invention is the ratio between the total number of seeds and the number of mature primary panicles. The seed fill rate as defined in the present invention is the proportion (expressed as a %) of the number of filled seeds over the total number of seeds (or florets).

### Example 31

### Results of the Phenotypic Evaluation of the Transgenic Plants

[0936] The results of the evaluation of transgenic rice plants expressing an STO nucleic acid under non-stress conditions are presented below. An increase of at least 5% was observed for emergence vigour (early vigour), and between 3 and 6 days (6-9%), depending on the specific transgenic line, earlier flowering was observed in the transgenic plants when compared to relative control plant.

[0937] The results of the evaluation of transgenic rice plants expressing an STO nucleic acid under drought-stress conditions are presented hereunder. An increase was observed for total seed weight, number of filled seeds, fill rate, harvest index and thousand-kernel weight (Table D).

TABLE D
Result phenotypic evaluation of the transgenic STO plants.

| | Percentage difference |
|---|---|
| | for the transgenic |
| Parameter | versus the control plants |
| Emergence vigour | 15 |
| Flowering time (early/shorter) | 7 |

### Example 32

### Cloning of the Nucleic Acid Sequence Used in the Methods of the Invention Encoding a UGE (UDP-Glucose 4-Epimerase or UDP-Gal 4-Epimerase) Polypeptide

[0938] The nucleic acid sequence used in the methods of the invention was amplified by PCR using as template a custom-made Oryza sativa seedlings cDNA library (in pCMV Sport 6.0; Invitrogen, Paisley, UK). PCR was performed using Hifi Taq DNA polymerase in standard conditions, using 200 ng of template in a 50 μl PCR mix. The primers used were prm1 (SEQ ID NO: 272; sense, start codon in bold): 5′-ggggacaagtttgtacaaaaaagcaggcttaaacaatggtttc ggccttgttg-3′ and prm2 (SEQ ID NO: 273; reverse, complementary): 5′-ggggaccactttgtacaag aaagctgggtgctgctgctactggaggatt-3′, which include the AttB sites for Gateway recombination. The amplified PCR fragment was purified also using standard methods. The first step of the Gateway procedure, the BP reaction, was then performed, during which the PCR fragment recombines in vivo with the pDONR201 plasmid to produce, according to the Gateway terminology, an “entry clone”, pUGE. Plasmid pDONR201 was purchased from Invitrogen, as part of the Gateway® technology.

[0939] The entry clone comprising SEQ ID NO: 224 was then used in an LR reaction with a destination vector used for Oryza sativa transformation. This vector contained as functional elements within the T-DNA borders: a plant selectable marker; a screenable marker expression cassette; and a Gateway cassette intended for LR in vivo recombination with the nucleic acid sequence of interest already cloned in the entry clone. A rice GOS2 promoter (SEQ ID NO: 274) for root specific expression was located upstream of this Gateway cassette.

[0940] After the LR recombination step, the resulting expression vector pGOS2::UGE (FIG. 22) was transformed into Agrobacterium strain LBA4044 according to methods well known in the art.

### Example 33

### Plant Transformation

### Rice Transformation

[0941] The Agrobacterium containing the expression vector was used to transform Oryza sativa plants. Mature dry seeds of the rice japonica cultivar Nipponbare were dehusked. Sterilization was carried out by incubating for one minute in 70% ethanol, followed by 30 minutes in 0.2% HgCl₂, followed by a 6 times 15 minutes wash with sterile distilled water. The sterile seeds were then germinated on a medium containing 2,4-D (callus induction medium). After incubation in the dark for four weeks, embryogenic, scutellum-derived calli were excised and propagated on the same medium. After two weeks, the calli were multiplied or propagated by subculture on the same medium for another 2 weeks. Embryogenic callus pieces were sub-cultured on fresh medium 3 days before co-cultivation (to boost cell division activity).

[0942] Agrobacterium strain LBA4404 containing the expression vector was used for co-cultivation. Agrobacterium was inoculated on AB medium with the appropriate antibiotics and cultured for 3 days at 28° C. The bacteria were then collected and suspended in liquid co-cultivation medium to a density (OD₆₀₀) of about 1. The suspension was then transferred to a Petri dish and the calli immersed in the suspension for 15 minutes. The callus tissues were then blotted dry on a filter paper and transferred to solidified, co-cultivation medium and incubated for 3 days in the dark at 25° C. Co-cultivated calli were grown on 2,4-D-containing medium for 4 weeks in the dark at 28° C. in the presence of a selection agent. During this period, rapidly growing resistant callus islands developed. After transfer of this material to a regeneration medium and incubation in the light, the embryogenic potential was released and shoots developed in the next four to five weeks. Shoots were excised from the calli and incubated for 2 to 3 weeks on an auxin-containing medium from which they were transferred to soil. Hardened shoots were grown under high humidity and short days in a greenhouse.

[0943] Approximately 35 independent T0 rice transformants were generated for one construct. The primary transformants were transferred from a tissue culture chamber to a greenhouse. After a quantitative PCR analysis to verify copy number of the T-DNA insert, only single copy transgenic plants that exhibit tolerance to the selection agent were kept for harvest of T1 seed. Seeds were then harvested three to five months after transplanting. The method yielded single locus transformants at a rate of over 50% (Aldemita and Hodges1996, Chan et al. 1993, Hiei et al. 1994).

### Corn Transformation

[0944] Transformation of maize (Zea mays) is performed with a modification of the method described by Ishida et al. (1996) Nature Biotech 14(6): 745-50. Transformation is genotype-dependent in corn and only specific genotypes are amenable to transformation and regeneration. The inbred line A188 (University of Minnesota) or hybrids with A188 as a parent are good sources of donor material for transformation, but other genotypes can be used successfully as well. Ears are harvested from corn plant approximately 11 days after pollination (DAP) when the length of the immature embryo is about 1 to 1.2 mm. Immature embryos are cocultivated with Agrobacterium tumefaciens containing the expression vector, and transgenic plants are recovered through organogenesis. Excised embryos are grown on callus induction medium, then maize regeneration medium, containing the selection agent (for example imidazolinone but various selection markers can be used). The Petri plates are incubated in the light at 25° C. for 2-3 weeks, or until shoots develop. The green shoots are transferred from each embryo to maize rooting medium and incubated at 25° C. for 2-3 weeks, until roots develop. The rooted shoots are transplanted to soil in the greenhouse. T1 seeds are produced from plants that exhibit tolerance to the selection agent and that contain a single copy of the T-DNA insert.

### Wheat Transformation

[0945] Transformation of wheat is performed with the method described by Ishida et al. (1996) Nature Biotech 14(6): 745-50. The cultivar Bobwhite (available from CIMMYT, Mexico) is commonly used in transformation. Immature embryos are co-cultivated with Agrobacterium tumefaciens containing the expression vector, and transgenic plants are recovered through organogenesis. After incubation with Agrobacterium, the embryos are grown in vitro on callus induction medium, then regeneration medium, containing the selection agent (for example imidazolinone but various selection markers can be used). The Petri plates are incubated in the light at 25° C. for 2-3 weeks, or until shoots develop. The green shoots are transferred from each embryo to rooting medium and incubated at 25° C. for 2-3 weeks, until roots develop. The rooted shoots are transplanted to soil in the greenhouse. T1 seeds are produced from plants that exhibit tolerance to the selection agent and that contain a single copy of the T-DNA insert.

### Soybean Transformation

[0946] Soybean is transformed according to a modification of the method described in the Texas A&M U.S. Pat. No. 5,164,310. Several commercial soybean varieties are amenable to transformation by this method. The cultivar Jack (available from the Illinois Seed foundation) is commonly used for transformation. Soybean seeds are sterilised for in vitro sowing. The hypocotyl, the radicle and one cotyledon are excised from seven-day old young seedlings. The epicotyl and the remaining cotyledon are further grown to develop axillary nodes. These axillary nodes are excised and incubated with Agrobacterium tumefaciens containing the expression vector. After the cocultivation treatment, the explants are washed and transferred to selection media. Regenerated shoots are excised and placed on a shoot elongation medium. Shoots no longer than 1 cm are placed on rooting medium until roots develop. The rooted shoots are transplanted to soil in the greenhouse. T1 seeds are produced from plants that exhibit tolerance to the selection agent and that contain a single copy of the T-DNA insert.

### Rapeseed/Canola Transformation

[0947] Cotyledonary petioles and hypocotyls of 5-6 day old young seedling are used as explants for tissue culture and transformed according to Babic et al. (1998, Plant Cell Rep 17: 183-188). The commercial cultivar Westar (Agriculture Canada) is the standard variety used for transformation, but other varieties can also be used. Canola seeds are surface-sterilized for in vitro sowing. The cotyledon petiole explants with the cotyledon attached are excised from the in vitro seedlings, and inoculated with Agrobacterium (containing the expression vector) by dipping the cut end of the petiole explant into the bacterial suspension. The explants are then cultured for 2 days on MSBAP-3 medium containing 3 mg/l BAP, 3% sucrose, 0.7% Phytagar at 23° C., 16 hr light. After two days of co-cultivation with Agrobacterium, the petiole explants are transferred to MSBAP-3 medium containing 3 mg/l BAP, cefotaxime, carbenicillin, or timentin (300 mg/l) for 7 days, and then cultured on MSBAP-3 medium with cefotaxime, carbenicillin, or timentin and selection agent until shoot regeneration. When the shoots are 5-10 mm in length, they are cut and transferred to shoot elongation medium (MSBAP-0.5, containing 0.5 mg/l BAP). Shoots of about 2 cm in length are transferred to the rooting medium (MS0) for root induction. The rooted shoots are transplanted to soil in the greenhouse. T1 seeds are produced from plants that exhibit tolerance to the selection agent and that contain a single copy of the T-DNA insert.

### Alfalfa Transformation

[0948] A regenerating clone of alfalfa (Medicago sativa) is transformed using the method of (McKersie et al., 1999 Plant Physiol 119: 839-847). Regeneration and transformation of alfalfa is genotype dependent and therefore a regenerating plant is required. Methods to obtain regenerating plants have been described. For example, these can be selected from the cultivar Rangelander (Agriculture Canada) or any other commercial alfalfa variety as described by Brown DCW and A Atanassov (1985. Plant Cell Tissue Organ Culture 4: 111-112). Alternatively, the RA3 variety (University of Wisconsin) has been selected for use in tissue culture (Walker et al., 1978 Am J Bot 65:654-659). Petiole explants are cocultivated with an overnight culture of Agrobacterium tumefaciens C58C1 pMP90 (McKersie et al., 1999 Plant Physiol 119: 839-847) or LBA4404 containing the expression vector. The explants are cocultivated for 3 d in the dark on SH induction medium containing 288 mg/L Pro, 53 mg/L thioproline, 4.35 g/L K2SO4, and 100 μm acetosyringinone. The explants are washed in half-strength Murashige-Skoog medium (Murashige and Skoog, 1962) and plated on the same SH induction medium without acetosyringinone but with a suitable selection agent and suitable antibiotic to inhibit Agrobacterium growth. After several weeks, somatic embryos are transferred to BOi2Y development medium containing no growth regulators, no antibiotics, and 50 g/L sucrose. Somatic embryos are subsequently germinated on half-strength Murashige-Skoog medium. Rooted seedlings were transplanted into pots and grown in a greenhouse. T1 seeds are produced from plants that exhibit tolerance to the selection agent and that contain a single copy of the T-DNA insert.

### Example 34

### Phenotypic Evaluation Procedure

### 34.1 Evaluation Setup

[0949] Approximately 35 independent T0 rice transformants were generated. The primary transformants were transferred from a tissue culture chamber to a greenhouse for growing and harvest of T1 seed. Six events, of which the T1 progeny segregated 3:1 for presence/absence of the transgene, were retained. For each of these events, approximately 10 T1 seedlings containing the transgene (hetero- and homo-zygotes) and approximately 10 T1 seedlings lacking the transgene (nullizygotes) were selected by monitoring visual marker expression. The transgenic plants and the corresponding nullizygotes were grown side-by-side at random positions. Greenhouse conditions were of shorts days (12 hours light), 28° C. in the light and 22° C. in the dark, and a relative humidity of 70%.

[0950] Four T1 events were further evaluated in the T2 generation following the same evaluation procedure as for the T1 generation but with more individuals per event. From the stage of sowing until the stage of maturity the plants were passed several times through a digital imaging cabinet. At each time point digital images (2048×1536 pixels, 16 million colours) were taken of each plant from at least 6 different angles.

### Drought Screen

[0951] Plants from T2 seeds were grown in potting soil under normal conditions until they approached the heading stage. They were then transferred to a “dry” section where irrigation was withheld. Humidity probes were inserted in randomly chosen pots to monitor the soil water content (SWC). When SWC went below certain thresholds, the plants were automatically re-watered continuously until a normal level was reached again. The plants were then re-transferred again to normal conditions. The rest of the cultivation (plant maturation, seed harvest) was the same as for plants not grown under abiotic stress conditions. Growth and yield parameters are recorded as detailed for growth under normal conditions.

### Nitrogen Use Efficiency Screen

[0952] Rice plants from T2 seeds are grown in potting soil under normal conditions except for the nutrient solution. The pots were watered from transplantation to maturation with a specific nutrient solution containing reduced N nitrogen (N) content, usually between 7 to 8 times less. The rest of the cultivation (plant maturation, seed harvest) was the same as for plants not grown under abiotic stress. Growth and yield parameters are recorded as detailed for growth under normal conditions.

### 34.2 Statistical Analysis: F Test

[0953] A two factor ANOVA (analysis of variants) was used as a statistical model for the overall evaluation of plant phenotypic characteristics. An F test was carried out on all the parameters measured of all the plants of all the events transformed with the gene of the present invention. The F test was carried out to check for an effect of the gene over all the transformation events and to verify for an overall effect of the gene, also known as a global gene effect. The threshold for significance for a true global gene effect was set at a 5% probability level for the F test. A significant F test value points to a gene effect, meaning that it is not only the mere presence or position of the gene that is causing the differences in phenotype.

[0954] Because two experiments with overlapping events were carried out, a combined analysis was performed. This is useful to check consistency of the effects over the two experiments, and if this is the case, to accumulate evidence from both experiments in order to increase confidence in the conclusion. The method used was a mixed-model approach that takes into account the multilevel structure of the data (i.e. experiment-event-segregants). P values were obtained by comparing likelihood ratio test to chi square distributions.

### 34.3 Parameters Measured

[0955] Biomass-Related Parameter Measurement

[0956] From the stage of sowing until the stage of maturity the plants were passed several times through a digital imaging cabinet. At each time point digital images (2048×1536 pixels, 16 million colours) were taken of each plant from at least 6 different angles. The plant aboveground area (or leafy biomass) was determined by counting the total number of pixels on the digital images from aboveground plant parts discriminated from the background. This value was averaged for the pictures taken on the same time point from the different angles and was converted to a physical surface value expressed in square mm by calibration. Experiments show that the aboveground plant area measured this way correlates with the biomass of plant parts above ground. The above ground area is the area measured at the time point at which the plant had reached its maximal leafy biomass. The early vigour is the plant (seedling) aboveground area three weeks post-germination. Increase in root biomass is expressed as an increase in total root biomass (measured as maximum biomass of roots observed during the lifespan of a plant); or as an increase in the root/shoot index (measured as the ratio between root mass and shoot mass in the period of active growth of root and shoot).

[0957] Early vigour was determined by counting the total number of pixels from aboveground plant parts discriminated from the background. This value was averaged for the pictures taken on the same time point from different angles and was converted to a physical surface value expressed in square mm by calibration. The results described below are for plants three weeks post-germination.

### Seed-Related Parameter Measurements

[0958] The mature primary panicles were harvested, counted, bagged, barcode-labelled and then dried for three days in an oven at 37° C. The panicles were then threshed and all the seeds were collected and counted. The filled husks were separated from the empty ones using an air-blowing device. The empty husks were discarded and the remaining fraction was counted again. The filled husks were weighed on an analytical balance. The number of filled seeds was determined by counting the number of filled husks that remained after the separation step. The total seed yield was measured by weighing all filled husks harvested from a plant. Total seed number per plant was measured by counting the number of husks harvested from a plant. Thousand Kernel Weight (TKW) is extrapolated from the number of filled seeds counted and their total weight. The Harvest Index (HI) in the present invention is defined as the ratio between the total seed yield and the above ground area (mm²), multiplied by a factor 10⁶. The total number of flowers per panicle as defined in the present invention is the ratio between the total number of seeds and the number of mature primary panicles. The seed fill rate as defined in the present invention is the proportion (expressed as a %) of the number of filled seeds over the total number of seeds (or florets).

### Example 35

### Results of the Phenotypic Evaluation of the Transgenic Plants

[0959] The results of the evaluation of transgenic rice plants expressing a UGE nucleic acid under non-stress conditions and under drought-stress (water limiting) conditions are presented below. An increase of at least 5% was observed for total seed yield, number of filled seeds, fill rate, and harvest index. Table E shows the results of the phenotypic evaluation.

TABLE E
Result of the phenotypic evaluation of transgenic plants.

| | non-stress | drought-stress |
|---|---|---|
| | % Difference | % Difference |
| Yield trait | transgenic/control* | transgenic/control* |
| See yield (grams) | 15 | 45 |
| Nr of filled seed | 13 | 42 |
| Fill rate | 5 | 45 |
| Harvest index | 10 | 49 |

*Increase measured in the transgenic plants versus the corresponding control nullyzygous plants, expressed in percentage (%).

1. A method for enhancing yield-related traits in plants relative to control plants, comprising modulating expression in a plant of a nucleic acid encoding a yield increasing polypeptide selected from the group consisting of:
(i) a bHLH6-like (basic Helix-Loop-Helix 6-like) protein,
(ii) a GRP (Growth Regulating Protein), wherein said GRP is selected from the group consisting of:
(a) an RrmJ/FtsS ribosomal RNA methyltransferase polypeptide (RrmJ/FtsJ polypeptide),
(b) a basic-helix-loop-helix 4 (bHLH4) polypeptide, and
(c) an isopentenyl transferase (IPT) polypeptide
(iii) an STO (Salt Tolerance) (Salt Tolerance) protein, and
(iv) a UGE (UDP-Glucose-4-Epimerase or UDP-Gal-4-Epimerase), polypeptide.

2. The method according to claim 1, wherein said yield increasing polypeptide is selected from the group consisting of:
(i) a polypeptide with the activity of any of the polypeptides as depicted in table A1, A2, A3, A4, A5 and/or A6;
(ii) a polypeptide with a sequence according to any of the polypeptides as depicted in table A1, A2, A3, A4, A5 and/or A6;
(iii) a polypeptide encoded by any of the nucleic acids as depicted in Table A1, A2, A3, A4, A5 and/or A6 or of a nucleic acid capable of hybridising hybridizing with such a nucleic acid, and
(iv) a polypeptide comprising at least one of the motifs as depicted in motif 1 to 12 or as shown in the figures.

3. A method for enhancing yield-related traits in plants relative to control plants, comprising modulating expression in a plant of a nucleic acid encoding a bHLH6-like polypeptide, wherein said bHLH6-like polypeptide comprises a HLH domain.

4. The method according to claim 1, wherein said bHLH6-like polypeptide comprises one or more of the following motifs:
(i) Motif 1 (SEQ ID NO: 3),
(ii) Motif 2 (SEQ ID NO: 4),
(iii) Motif 3(SEQ ID NO: 5), and
(iv) Motif 7 (SEQ ID NO: 9) or a sequence that has at least 80% sequence identity to SEQ ID NO: 9.

5. The method according to claim 3, wherein said modulated expression is effected by introducing and expressing in a plant a nucleic acid encoding a bHLH6-like polypeptide.

6. The method according to claim 1, wherein said nucleic acid encoding a bHLH6-like polypeptide encodes any one of the proteins listed in Table A1 or is a portion of such a nucleic acid, or a nucleic acid capable of hybridizing with such a nucleic acid.

7. The method according to claim 1, wherein said nucleic acid sequence encodes an orthologue or paralogue of any of the proteins given in Table A1.

8. The method according to claim 1, wherein said enhanced yield-related traits comprise increased yield, increased emergence vigour, and/or increased seed yield relative to control plants.

9. The method according to claim 1, wherein said enhanced yield-related traits are obtained under non-stress conditions.

10. The method according to claim 5, wherein said nucleic acid is operably linked to a constitutive promoter, preferably to a GOS2 promoter, most preferably to a GOS2 promoter from rice.

11. The method according to claim 1, wherein said nucleic acid encoding a bHLH6-like polypeptide is of plant origin, preferably from a dicotyledonous plant, further preferably from the family Brassicaceae, more preferably from the genus Arabidopsis, most preferably from Arabidopsis thaliana.

12. A plant or part thereof, including seeds, obtained by the method according to claim 1, wherein said plant or part thereof comprises a recombinant nucleic acid encoding a bHLH6-like polypeptide.

13. A construct comprising:
(i) a nucleic acid encoding a bHLH6-like polypeptide as defined in claim 4;
(ii) one or more control sequences capable of driving expression of the nucleic acid sequence of (a); and optionally
(iii) a transcription termination sequence.

14. The construct according to claim 13, wherein one of said control sequences is a constitutive promoter, preferably a GOS2 promoter, most preferably a GOS2 promoter from rice.

15. A method for making plants having increased yield, increased emergence vigour, and/or increased seed yield relative to control plants, comprising utilizing the construct according to claim 13.

16. A plant, plant part or plant cell transformed with the construct according to claim 13.

17. A method for the production of a transgenic plant having increased yield, increased biomass, and/or increased seed yield relative to control plants, comprising:
(i) introducing and expressing in a plant a nucleic acid encoding a bHLH6-like polypeptide as defined in claim 4; and
(ii) cultivating the plant cell under conditions promoting plant growth and development.

18. A transgenic plant having increased yield, increased biomass, and/or increased seed yield, relative to control plants, resulting from modulated expression of a nucleic acid encoding a bHLH6-like polypeptide as defined in claim 4, or a transgenic plant cell derived from said transgenic plant.

19. The transgenic plant according to claim 18, or a transgenic plant cell derived thereof, wherein said plant is a crop plant or a monocot or a cereal, such as rice, maize, wheat, barley, millet, rye, triticale, sorghum emmer, spelt, secale, einkorn, teff, milo and oats.

20. Harvestable parts of the plant according to claim 19, wherein said harvestable parts are preferably shoot biomass and/or seeds.

21. Products derived from the plant according to claim 19 and/or from harvestable parts of said plant.

22. A method for increasing yield, increasing seed yield and/or shoot biomass in plants, relative to control plants, comprising utilizing a nucleic acid encoding a bHLH6-like polypeptide.

The application's sequence listing, which the Patent Office published only in electronic form, follows.

SEQUENCE LISTING (320 sequences)

SEQ ID NO: 1 - DNA, 1872 bp, Arabidopsis thaliana
atgactgattaccggctacaaccaacgatgaatctttggaccaccgacgacaacgcttctatgatggaagctttcatgagctcttccgatatctcaactttatggcctccggcgtcgacgacaaccacgacggcgacgactgaaacaactccgacgccggcgatggagattccggcacaggcgggatttaatcaagagactcttcagcaacgtttacaagctttgattgaaggaacacacgaaggttggacctacgctatattctggcaaccgtcgtatgatttctccggcgcctccgtgctcggatggggagatggttattacaaaggtgaagaagataaagcaaacccgagacggagatcgagttcgccgccgttttctactccggcggatcaggagtacaggaaaaaagtgttgagagagcttaactcgttgatctccggtggtgttgctccgtcggatgacgctgttgatgaggaggtgacggatacggaatggtttttcttggtttcgatgacgcagagcttcgcttgcggtgcgggattagctggtaaagcgtttgcaacgggtaacgcggtttgggtttccgggtcagatcaattatccgggtcgggttgtgaacgggctaagcaaggaggagtgtttgggatgcatactattgcgtgtattccttcggcgaacggagttgtggaagtcgggtcaacggagccgatccgacagagttcggaccttattaacaaggttcgaattcttttcaatttcgacggcggagctggagatttatcgggtcttaattggaatcttgacccggatcaaggtgagaacgacccgtctatgtggattaatgacccgattggaacacctggatctaacgaaccgggtaacggagctccaagttctagctcccagcttttttcaaagtctattcagtttgagaacggtagctcaagcacaataaccgaaaacccgaatctggatccgactccgagtccggttcattctcagacccagaatccgaaattcaataacactttctcccgagaacttaatttttcgacgtcaagttctactttagtgaaaccaagatccggcgagatattaaacttcggcgatgaaggtaaacgaagctccggaaacccggatccaagttcttattcgggtcaaacacaattcgaaaacaaaagaaagaggtcgatggttttgaacgaagataaagttctatcattcggagataaaaccgccggagaatcagatcactccgatctagaagcttccgtcgtgaaagaagtagcagtagagaaacgtccaaagaaacgaggaagaaagccagcaaacggtagagaagagccactaaaccacgtcgaagcagagagacaaagacgcgagaaactaaaccaaagattctacgcgttacgagcggttgtaccaaacgtttcaaaaatggataaagcttcgttactcggtgacgcaatcgcttacatcaacgagcttaaatccaaagtagtcaaaacagagtcagagaaactccaaatcaagaaccagctcgaggaagtgaaactcgagctcgccggaagaaaagcgagtgctagtggaggagatatgtcgtcttcgtgttcttcgattaaaccggtggggatggagattgaagtgaagataattggttgggacgcaatgattagagttgaatctagtaagaggaatcatccggcggcgaggttgatgtcggcgttgatggatttggagttggaagtgaatcacgcgagtatgtcggtggttaacgatttgatgattcaacaagcgacggtgaagatgggttttaggatctatacgcaagaacagctcagagcaagtttgatttcaaaaatcggttaa

SEQ ID NO: 2 - protein, 623 aa, Arabidopsis thaliana
MTDYRLQPTMNLWTTDDNASMMEAFMSSSDISTLWPPASTTTTTATTETTPTPAMEIPAQAGFNQETLQQRLQALIEGTHEGWTYAIFWQPSYDFSGASVLGWGDGYYKGEEDKANPRRRSSSPPFSTPADQEYRKKVLRELNSLISGGVAPSDDAVDEEVTDTEWFFLVSMTQSFACGAGLAGKAFATGNAVWVSGSDQLSGSGCERAKQGGVFGMHTIACIPSANGVVEVGSTEPIRQSSDLINKVRILFNFDGGAGDLSGLNWNLDPDQGENDPSMWINDPIGTPGSNEPGNGAPSSSSQLFSKSIQFENGSSSTITENPNLDPTPSPVHSQTQNPKFNNTFSRELNFSTSSSTLVKPRSGEILNFGDEGKRSSGNPDPSSYSGQTQFENKRKRSMVLNEDKVLSFGDKTAGESDHSDLEASVVKEVAVEKRPKKRGRKPANGREEPLNHVEAERQRREKLNQRFYALRAVVPNVSKMDKASLLGDAIAYINELKSKVVKTESEKLQIKNQLEEVKLELAGRKASASGGDMSSSCSSIKPVGMEIEVKIIGWDAMIRVESSKRNHPAARLMSALMDLELEVNHASMSVVNDLMIQQATVKMGFRIYTQEQLRASLISKIG

SEQ ID NO: 3 - protein, 11 aa, Artificial sequence
  Motif 1
  VARIANT (2)..(2): /replace = "Glu" /replace = "Thr"
  UNSURE (4)..(4): Unknown amino acid
  VARIANT (5)..(5): /replace = "Glu"
  VARIANT (6)..(6): /replace = "Ser"
  UNSURE (7)..(7): Unknown amino acid
  VARIANT (8)..(8): /replace = "Phe"
  VARIANT (9)..(9): /replace = "Asn"
  VARIANT (11)..(11): /replace = "Asp"
LGWXDGXYKGE

SEQ ID NO: 4 - protein, 9 aa, Artificial sequence
  Motif 2
  VARIANT (2)..(2): /replace = "Ile"
  VARIANT (3)..(3): /replace = "Ile" /replace = "Leu"
  VARIANT (5)..(5): /replace = "Leu" /replace = "Ile"
  VARIANT (6)..(6): /replace = "Ala"
  VARIANT (7)..(7): /replace = "Val" /replace = "Thr" /replace = "Ala"
  VARIANT (8)..(8): /replace = "Leu" /replace = "Ser"
  VARIANT (9)..(9): /replace = "Asp" /replace = "Ser"
GVVEVGSTE

SEQ ID NO: 5 - protein, 7 aa, Artificial sequence
  Motif 3
  VARIANT (1)..(1): /replace = "Glu"
  VARIANT (3)..(3): /replace = "Val" /replace = "Ile"
  VARIANT (5)..(5): /replace = "Ile" /replace = "Val"
  VARIANT (7)..(7): /replace = "Asp" /replace = "Glu" /replace = "Ala"
DKASLLG

SEQ ID NO: 6 - protein, 7 aa, Artificial sequence
  Motif 4
  VARIANT (1)..(1): /replace = "Asn" /replace = "Ser"
  VARIANT (4)..(4): /replace = "His"
TLQQRLQ

SEQ ID NO: 7 - protein, 12 aa, Artificial sequence
  Motif 5
  VARIANT (1)..(1): /replace = "Phe"
  VARIANT (2)..(2): /replace = "Phe" /replace = "Val"
  VARIANT (3)..(3): /replace = "Leu" /replace = "Val" /replace = "Met" /replace = "Ser"
  VARIANT (5)..(5): /replace = "Leu" /replace = "Arg" /replace = "Asn" /replace = "Glu"
  VARIANT (6)..(6): /replace = "Asp"
  VARIANT (9)..(9): /replace = "Val"
  VARIANT (10)..(10): /replace = "Arg"
  VARIANT (11)..(11): /replace = "Ile"
  VARIANT (12)..(12): /replace = "Asn" /replace = "Glu" /replace = "Tyr"
KIIGWEAMIGVQ

SEQ ID NO: 8 - protein, 14 aa, Artificial sequence
  Motif 6
  VARIANT (1)..(1): /replace = "Tyr"
  VARIANT (2)..(2): /replace = "Ser"
  VARIANT (3)..(3): /replace = "Asn"
  VARIANT (4)..(4): /replace = "Cys" /replace = "Met" /replace = "Leu" /replace = "Thr"
  VARIANT (5)..(5): /replace = "Gln"
  VARIANT (6)..(6): /replace = "Cys" /replace = "Ser"
  VARIANT (7)..(7): /replace = "Met" /replace = "Phe"
  VARIANT (8)..(8): /replace = "Asn" /replace = "Ser"
  VARIANT (9)..(9): /replace = "Cys" /replace = "Glu"
  VARIANT (10)..(10): /replace = "Gln" /replace = "Phe" /replace = "Met"
  VARIANT (11)..(11): /replace = "Arg" /replace = "Leu"
  VARIANT (12)..(12): /replace = "Phe" /replace = "Leu"
  VARIANT (13)..(13): /replace = "Asp" /replace = "His"
  VARIANT (14)..(14): /replace = "Asp" /replace = "Val"
HASVSVVKDLMIQQ

SEQ ID NO: 9 - protein, 70 aa, Artificial sequence
  Motif 7
PKKRGRKPANGREEPLNHVEAERQRREKLNQRFYALRAVVPNVSKMDKASLLGDAIAYINELKSKVVKTE

SEQ ID NO: 10 - DNA, 56 bp, Artificial sequence
  primer: prm06515
ggggacaagtttgtacaaaaaagcaggcttaaacaatgactgattaccggctacaa

SEQ ID NO: 11 - DNA, 50 bp, Artificial sequence
  primer: prm06516
ggggaccactttgtacaagaaagctgggtacacccttttaaccgattttt

SEQ ID NO: 12 - DNA, 2194 bp, Oryza sativa
aatccgaaaagtttctgcaccgttttcaccccctaactaacaatatagggaacgtgtgctaaatataaaatgagaccttatatatgtagcgctgataactagaactatgcaagaaaaactcatccacctactttagtggcaatcgggctaaataaaaaagagtcgctacactagtttcgttttccttagtaattaagtgggaaaatgaaatcattattgcttagaatatacgttcacatctctgtcatgaagttaaattattcgaggtagccataattgtcatcaaactcttcttgaataaaaaaatctttctagctgaactcaatgggtaaagagagagattttttttaaaaaaatagaatgaagatattctgaacgtattggcaaagatttaaacatataattatataattttatagtttgtgcattcgtcatatcgcacatcattaaggacatgtcttactccatcccaatttttatttagtaattaaagacaattgacttatttttattatttatcttttttcgattagatgcaaggtacttacgcacacactttgtgctcatgtgcatgtgtgagtgcacctcctcaatacacgttcaactagcaacacatctctaatatcactcgcctatttaatacatttaggtagcaatatctgaattcaagcactccaccatcaccagaccacttttaataatatctaaaatacaaaaaataattttacagaatagcatgaaaagtatgaaacgaactatttaggtttttcacatacaaaaaaaaaaagaattttgctcgtgcgcgagcgccaatctcccatattgggcacacaggcaacaacagagtggctgcccacagaacaacccacaaaaaacgatgatctaacggaggacagcaagtccgcaacaaccttttaacagcaggctttgcggccaggagagaggaggagaggcaaagaaaaccaagcatcctccttctcccatctataaattcctccccccttttcccctctctatataggaggcatccaagccaagaagagggagagcaccaaggacacgcgactagcagaagccgagcgaccgccttctcgatccatatcttccggtcgagttcttggtcgatctcttccctcctccacctcctcctcacagggtatgtgcctcccttcggttgttcttggatttattgttctaggttgtgtagtacgggcgttgatgttaggaaaggggatctgtatctgtgatgattcctgttcttggatttgggatagaggggttcttgatgttgcatgttatcggttcggtttgattagtagtatggttttcaatcgtctggagagctctatggaaatgaaatggtttagggatcggaatcttgcgattttgtgagtaccttttgtttgaggtaaaatcagagcaccggtgattttgcttggtgtaataaagtacggttgtttggtcctcgattctggtagtgatgcttctcgatttgacgaagctatcctttgtttattccctattgaacaaaaataatccaactttgaagacggtcccgttgatgagattgaatgattgattcttaagcctgtccaaaatttcgcagctggcttgtttagatacagtagtccccatcacgaaattcatggaaacagttataatcctcaggaacaggggattccctgttcttccgatttgctttagtcccagaattttttttcccaaatatcttaaaaagtcactttctggttcagttcaatgaattgattgctacaaataatgcttttatagcgttatcctagctgtagttcagttaataggtaatacccctatagtttagtcaggagaagaacttatccgatttctgatctccatttttaattatatgaaatgaactgtagcataagcagtattcatttggattattttttttattagctctcaccccttcattattctgagctgaaagtctggcatgaactgtcctcaattttgttttcaaattcacatcgattatctatgcattatcctcttgtatctacctgtagaagtttctttttggttattccttgactgcttgattacagaaagaaatttatgaagctgtaatcgggatagttatactgcttgttcttatgattcatttcctttgtgcagttcttggtgtagcttgccactttcaccagcaaagttc

SEQ ID NO: 13 - DNA, 1929 bp, Phaseolus vulgaris
atgacggagtaccggtcgccgcccacaatgaatctctggaccgacgacaacgcttccgtcatggaggccttcatgagctcctccgatttctcctccctttggctgccaacaccgcaatccgctgcctctaccaccactccgggagccgacactgccagagccctgccgccgcctccgccgtcgcagtcccagtccctttttaaccaggagaccttacaacagcggctgcaaacgctgatcgaaggcgccgaagagagctggacctacgccattttctggcaatcttcttatgactactcctccagcacttcccttctcggttggggtgacggatactacaagggagaggaggacaaaggaaaaggaaaagcccccaaagagatgtcgtcggcggagcaggaccaccgtaagaaggttctccgcgagctcaattcgttgatttccggccctttccgttccgctgatgacgtcgacgaagaggtatccgacactgagtggttctttctagtgtccatgactcagtcctttctcagcggaagcgggctcccgggccaggcttttcttaattccagcccggtttgggtcgccggggctgaccggttatccgattcgacgtcggagcgggctcgccaggggcaggtctttggggttcagactctggtttgcataccgtccgcaaacggcgtcgttgagctggcttctacggaggtgattttccagaactccgatctcatgaagaaagtgcgggatttgttcaacttcaacaacccagacgcgggtttctggccgttgaatcagggcgagaacgacccttcctcactctggctcaacccttcttcctcgattgaaatcaaggacacctctaacgccgttgcactcgtttcagcgaatgcatcactgagcaaaaccatgccgttcgaaacccctggttccagcactctaacagaaacccctagtgccgccgccgcagctcacgtccccaatcccaagaaccagggtttcttccccagagaattgaacttctcgaactccttaaaacccgaatccggtgaaattctgagcttcggagagagcaagaagagctcttacaacgggagttacttccccggtgttgcggctgaggagaccaacaagaagagaaggtctcctgcttctcgcagcagcattgacgatggaatgctgtccttcacctccggcgtgattataccggcttcgaatataaaatctggtgccgttgctggtggtggtgccagcggcggtgattccgagaactcggatctggaagcttccgtggtgaaagaggcggacagcagggtggtggagccggagaaacggccccggaagaggggtcggaagccggggaacggcagagaggagccgctgaatcacgtggaagcggagaggcagaggagggaaaagctgaatcaacggttctacgcgcttcgtgcggtggttcccaacgtgtcgaagatggacaaagcatcgctcttaggcgatgccatatcctacataaacgagctgaagtcgaagctgagtgagctggaatcagagaaaggggaattggagaagcaattggagttggtgaagaaggagcttgagctggcaactaaaagcccttctcctccacctgggccacctccatccaacaaagaagcgaaggaaacgacgagcaagctgattgatttggagttagaggtgaagatcatagggtgggacgccatgataaggatccaatgcagcaagaaaaaccaccctgcggccaggttgatggctgcgttgaaggagctggaccttgacgtgaatcatgccagcgtatccgtggtgaatgatttgatgatccaacaagccaccgtgaatatgggaaaccggttttacactcaggaacagctccggtcggcgcgctcctccaaaattggcaatgcactatag

SEQ ID NO: 14 - protein, 642 aa, Phaseolus vulgaris
MTEYRSPPTMNLWTDDNASVMEAFMSSSDFSSLWLPTPQSAASTTTPGADTARALPPPPPSQSQSLFNQETLQQRLQTLIEGAEESWTYAIFWQSSYDYSSSTSLLGWGDGYYKGEEDKGKGKAPKEMSSAEQDHRKKVLRELNSLISGPFRSADDVDEEVSDTEWFFLVSMTQSFLSGSGLPGQAFLNSSPVWVAGADRLSDSTSERARQGQVFGVQTLVCIPSANGVVELASTEVIFQNSDLMKKVRDLFNFNNPDAGFWPLNQGENDPSSLWLNPSSSIEIKDTSNAVALVSANASLSKTMPFETPGSSTLTETPSAAAAAHVPNPKNQGFFPRELNFSNSLKPESGEILSFGESKKSSYNGSYFPGVAAEETNKKRRSPASRSSIDDGMLSFTSGVIIPASNIKSGAVAGGGASGGDSENSDLEASVVKEADSRVVEPEKRPRKRGRKPGNGREEPLNHVEAERQRREKLNQRFYALRAVVPNVSKMDKASLLGDAISYINELKSKLSELESEKGELEKQLELVKKELELATKSPSPPPGPPPSNKEAKETTSKLIDLELEVKIIGWDAMIRIQCSKKNHPAARLMAALKELDLDVNHASVSVVNDLMIQQATVNMGNRFYTQEQLRSARSSKIGNAL

SEQ ID NO: 15 - DNA, 2100 bp, Catharanthus roseus
atgacggactataggctacaaccgaaaatgaacctatggggtacgacgaccaacaccgcagcttcaccaataattacttcagatgataatagttcgatgatggaggcttttatgacctcatcagatccgatttctttgtggccgccgtcaatgtctgtgaatcatcaccatccaccaactcctacttcttccgccgtaacaactgcggtggactccgctaaatctatgcctgcccaacctgcttttttcaatcaagaaaatctccaacagcgccttcaaactctaattgatggtgctagggagagttggacttatgccatattttggcagtcgtctgttgtcgaattcgccggtccttcggtcttgggttggggcgatggatattataagggagaagaagataaagggaagaggaagaattcgtcttccgcgagttcttttgcagaacaggaacacagaaagaaagtccttagagagctcaattctttgattgctgggccacaaggcaccgccgatgatgcagttgatgaagaggtgaccgataccgaatggtttttcttaatttcaatgactcagtcatttgtttccgggagcggtcttccagggcaggccttatacaattcaaacccggtatgggttaccggagcagggaggctggcggtttcacactgcgaccgggccaggcaggctcaaagttttgggcttcagaccttagtttgtattccctccgcaaacggcgttgtggagctgggttcaacggaattgatttttcagagctccgatctcatgaataaggttaggatactgttcaattttaataatatagatttgggttcgagctctggaccttggcctgagaacgatccttcttctctgtggcttactgatccatcgccctcaggggtaggggttaaggagggggtgaatactaataataatactagtgttcaagggaattcaattccttctggtaataagcagcaacttgtgtttggaaataatgataatcatccaaccacgagtactttgactgatcatcccggggctggggctgtaaatagttataataattcatctcagaatgcccagcagcctcaaggtagtttctttacaagggaattgaatttttcagaatacgggtttgaaaggagtagtgtaaagaatgggaattgtaagccagaatcgggagaaatattgaactttggtggtgaatctgttaccaagaagaattctgtaagtggaaatgggaacttgttttcagtacaatcacagtttggagctggggaggagaacaagaacaagaaaaggccatctcctgtgtcaagggggagcaatgatgaggggatgctttcttttacttctggggtagttttgccctctactggtgtagtgaagtctagtggtggtggtggtggtggagactccgatcattctgatcttgaggcctcagtggtgaaggaggcagagagtagtagggttgtggatcccgagaaacggcctaggaagagggggagaaagcctgcaaatggaagggaagagccattgaatcatgtggaggcagagaggcagaggagggagaagttgaaccagaggttctatgctcttagagccgtggttcctaatgtttcaaaaatggataaagcttcacttcttggtgatgctatttcttatatcaatgagttgaaagctaaacttcaaactacagaaacagataaagatgaattgaagaaccaattggactcattaaagaaggaattagcaagtaaagaatctcggcttttatcatcaccagatcaagatctcaagtcctcaaacaagcagtcagtgggtaacttggatatggatattgatgtgaaaatcattggtcgggaagcaatgattcgagtccaatccagtaaaaacaaccaccctgcagcaagagtaatgggagcactaaaggatcttgatcttgaattactccatgctagtgtctcagtggtaaatgatttgatgatccagcaaaatacagtgagaatggggagccgattttatactcaggagcagcttagaatagcattgacatccagaatagccggaaactcgatgaggctcttggtatga

SEQ ID NO: 16 - protein, 699 aa, Catharanthus roseus
MTDYRLQPKMNLWGTTTNTAASPIITSDDNSSMMEAFMTSSDPISLWPPSMSVNHHHPPTPTSSAVTTAVDSAKSMPAQPAFFNQENLQQRLQTLIDGARESWTYAIFWQSSVVEFAGPSVLGWGDGYYKGEEDKGKRKNSSSASSFAEQEHRKKVLRELNSLIAGPQGTADDAVDEEVTDTEWFFLISMTQSFVSGSGLPGQALYNSNPVWVTGAGRLAVSHCDRARQAQSFGLQTLVCIPSANGVVELGSTELIFQSSDLMNKVRILFNFNNIDLGSSSGPWPENDPSSLWLTDPSPSGVGVKEGVNTNNNTSVQGNSIPSGNKQQLVFGNNDNHPTTSTLTDHPGAGAVNSYNNSSQNAQQPQGSFFTRELNFSEYGFERSSVKNGNCKPESGEILNFGGESVTKKNSVSGNGNLFSVQSQFGAGEENKNKKRPSPVSRGSNDEGMLSFTSGVVLPSTGVVKSSGGGGGGDSDHSDLEASVVKEAESSRVVDPEKRPRKRGRKPANGREEPLNHVEAERQRREKLNQRFYALRAVVPNVSKMDKASLLGDAISYINELKAKLQTTETDKDELKNQLDSLKKELASKESRLLSSPDQDLKSSNKQSVGNLDMDIDVKIIGREAMIRVQSSKNNHPAARVMGALKDLDLELLHASVSVVNDLMIQQNTVRMGSRFYTQEQLRIALTSRIAGNSMRLLV

SEQ ID NO: 17 - DNA, 2079 bp, Solanum tuberosum
atgactgaatacagcttacccaccatgaatttgtggaacaatagtactagcgatgataacgtgtctatgatggaagcttttatgtcttctgatctttctttttgggctactactaattctactactactaattctgcttctgctgctgtggttggcgtcaattcaaatcttcttcatactaataataataatccgtctgtttttcctctatcttcttctacatctgtatccgcggctgcggctgttgatgctaccaaatctatgccgtttttcaaccaagaaacccttcagcagcgtcttcaagctcttatcgatggtgctagagagacgtggacttacgctatcttttggcaatcgtcggttgttgatttctcgagtccgtctgtgttgggttggggagatggttattacaaaggcgaagaagataaagccaaaaggaaattagcggtttcttctcctgcttatattgctgagcaggagcaccggaagaaggttctccgggagctgaattcgttgatttcaggggcaccagctgggaccgatgatgctgttgatgaagaagttaccgacaccgaatggttctttcttatctccatgacccaatcgtttgttaatggaagtgggcttcctggtcaggcgttgtatagttccagccctatttgggtcgccggaactgagaaattggcagcttcccactgcgaacgggttagacaagcacaagggttcgggcttcagactattgtctgtattccttcagctaacggcgtggttgaattgggctcgacagagttgattgttgaaagttctgatctcatgaacaaggttagagtattgtttaacttcagtaatgatttggggtctggttcatgggctgtgcagccggagagcgacccgtcggcgctttggctcactgaaccatcgtcctcaggtatggaagttagagagtctttaaatacagtacaaacaaattcagttccatcaagtaatagtaataagcaaattgcttatgcaaatgagaataatcatcaatctggaaatggtcagagttgttacaatctgcagcaacaacagaacaatcctcctcaacaacaaacacaaggatttttcacgagggagttgaatttttcggaattcgggttcgatggaagtagcaataggaatgggaatgcatcgctctcttgcaaacctgaatcaggagaaatcttgaattttggtgatagtactaaaaaaagtgcttccagtgcaaatgtgaacttgtttacgggtcagtcccaatttggggcagtggaggagaataacaataacaagaacaagaaaagatcagctacttccaggggaagcaatgaagaaggaatgctttcatttgtttcaggtacagttttgccttcttcgggtatgaagtcaggtggaggtggaggcgaagactctgaacattcagatcttgaggcttcagtggtgaaagaagctgatagtagtagagtggtagaaccagaaaagaggccaaggaagcgagggagaaagccagcgaatggacgagaggagcctttgaatcacgtcgaggcagagaggcaaaggagggagaaattgaaccaaagattctacgcgcttagagctgttgtaccaaatgtgtctaagatggacaaggcatcacttcttggagatgcaatttcatatataaacgagttgaaatcaaagcttcaaaatacagagtcagataaagaagacttgaagagccaaatagaagatttaaagaaagaatcaaggcgccccggtcctccaccaccaaaccaagatctcaagattggaggcaagattgtagacgtggatatagacgttaagataatcggatgggatgcaatgattggtatacaatgtaataaaaagaatcatccagctgcaaggttaatggcagccctcatggaattagacctagacgtgcaccatgccagtgtttcagttgtcaacgatttgatgatccaacaagccacagtgaaaatgggtagcagacattacactgaagagcagcttagggtagcattgaaatcgaaaattgctgaaacccccttagaaagtagatag

SEQ ID NO: 18 - protein, 692 aa, Solanum tuberosum
MTEYSLPTMNLWNNSTSDDNVSMMEAFMSSDLSFWATTNSTTTNSASAAVVGVNSNLLHTNNNNPSVFPLSSSTSVSAAAAVDATKSMPFFNQETLQQRLQALIDGARETWTYAIFWQSSVVDFSSPSVLGWGDGYYKGEEDKAKRKLAVSSPAYIAEQEHRKKVLRELNSLISGAPAGTDDAVDEEVTDTEWFFLISMTQSFVNGSGLPGQALYSSSPIWVAGTEKLAASHCERVRQAQGFGLQTIVCIPSANGVVELGSTELIVESSDLMNKVRVLFNFSNDLGSGSWAVQPESDPSALWLTEPSSSGMEVRESLNTVQTNSVPSSNSNKQIAYANENNHQSGNGQSCYNLQQQQNNPPQQQTQGFFTRELNFSEFGFDGSSNRNGNASLSCKPESGEILNFGDSTKKSASSANVNLFTGQSQFGAVEENNNNKNKKRSATSRGSNEEGMLSFVSGTVLPSSGMKSGGGGGEDSEHSDLEASVVKEADSSRVVEPEKRPRKRGRKPANGREEPLNHVEAERQRREKLNQRFYALRAVVPNVSKMDKASLLGDAISYINELKSKLQNTESDKEDLKSQIEDLKKESRRPGPPPPNQDLKIGGKIVDVDIDVKIIGWDAMIGIQCNKKNHPAARLMAALMELDLDVHHASVSVVNDLMIQQATVKMGSRHYTEEQLRVALKSKIAETPLESR

SEQ ID NO: 19 - DNA, 1941 bp, Pisum sativum
atgacagattaccgctcactcccgacaatgaataatagtatctggacagacgacaactcctccgtcatggaagctttcatgagcaccaccgccgacctttcttctatctggcttccaccaccaaattccgctgcatcaaccaccacaccaggacccgatacaaccaaacctccaccacaacaacagccactcttcaaccaagaaactctccaacaccgtcttcaagctttaatcgaagacgcaaaagagaattggacttacgccatcttctggcaaacctcttacgactactctacaagcagacagctccttggttggggagacggttattacaaaggcgaagatgacaaagaaaaagctaaaaaagttatcttgcctgaacaacaagctcatcgcaataaagtcctccgtgaacttaacgccttaatttccggctcatctagctcagatgatgtcgttgacgaagatgtcaccgacactgagtggttctttctcacgtcgatgacacactccttcgtcaacggaagcggtttactgagccaggcttactttaattcttccccagtatggatcaacgataggctttccatgtccacatgtgaaagaacccgtgcagcacatgttcacgggcttcagactttggtatatataccagcaccgtcttcaaacggtgtcgttgagctcgcatctactgagataattccacatagcgctggtataatggagaaggttcgttttttgtttgatttcaataatccagaagcacggtcttggccgttgaattccgccgacaacgatccttcttccatgtggttggatatccccggctccggtggaattgaaattagagactccatcaacactgttagtgccgtcagtgtaacggcttcagcaaatgcaacaatccctaaaaaatcgccgtttgaaattcacggtgcttctactactctaccggaatcatccaccaccgttaatatttcaactgctcagcgccaaatccagaatcaaaaccagaaccagagcttctttccaagagaactgaatttttcaggttctttcaaaccggaatccggcgagattctgaactttggggagagtaaaaagagttcttacagctctgccaatggtaatttcttttccggtccgtcaccattcgctgctaatgaagaaaacagaaaaagaagatccccggtgtctagaagtagtatcgaggacggaattctttcattcagttctggcaaactgttacatggttcaactataaaatccggtggcggagattccgatcattcagatctggaagtttctgtggtgaagaaaactgtgagcagcagagttatcgaaccagagaagcggcctcggaagcgaggtagaaaaccagccaacggaagagaagaacccttgaaccacgtggaagcagagaggcagcgacgggagaaactgaaccagagattctacgctttacgagctgtggttcctaatgtttctaaaatggacaaagcttcgcttcttggagacgcgatttcttacataaacgagttgaaattgaagctgcaagggcttgaatcgtcaaaagatgagttggagaaagaactagatacaacccgaaaggaactagaaattgcaactaaaaaaccagttcggttgaacgaagaagaaaaagagaaaccagaaaacaactctaagttgattgatttggacatagatgtgaaaatcatgggatgggatgctatgattaggattcagtgtagcaagaagaatcaccctgctgcgaaattaatggcggctttaaaagaattggatcttgatgtgaatcatgctagtgtttctgttgttaatgacttaatgattcaacaggcttctattaacatgggaagtagattttacacacaagaacagcttttatctgttctttcttccaaaattggtgatacacaatga

SEQ ID NO: 20 - protein, 646 aa, Pisum sativum
MTDYRSLPTMNNSIWTDDNSSVMEAFMSTTADLSSIWLPPPNSAASTTTPGPDTTKPPPQQQPLFNQETLQHRLQALIEDAKENWTYAIFWQTSYDYSTSRQLLGWGDGYYKGEDDKEKAKKVILPEQQAHRNKVLRELNALISGSSSSDDVVDEDVTDTEWFFLTSMTHSFVNGSGLLSQAYFNSSPVWINDRLSMSTCERTRAAHVHGLQTLVYIPAPSSNGVVELASTEIIPHSAGIMEKVRFLFDFNNPEARSWPLNSADNDPSSMWLDIPGSGGIEIRDSINTVSAVSVTASANATIPKKSPFEIHGASTTLPESSTTVNISTAQRQIQNQNQNQSFFPRELNFSGSFKPESGEILNFGESKKSSYSSANGNFFSGPSPFAANEENRKRRSPVSRSSIEDGILSFSSGKLLHGSTIKSGGGDSDHSDLEVSVVKKTVSSRVIEPEKRPRKRGRKPANGREEPLNHVEAERQRREKLNQRFYALRAVVPNVSKMDKASLLGDAISYINELKLKLQGLESSKDELEKELDTTRKELEIATKKPVRLNEEEKEKPENNSKLIDLDIDVKIMGWDAMIRIQCSKKNHPAAKLMAALKELDLDVNHASVSVVNDLMIQQASINMGSRFYTQEQLLSVLSSKIGDTQ

SEQ ID NO: 21 - DNA, 1761 bp, Brassica oleracea
tcaaactctctccattagagcagccttgagctgatcctgcgtgaaaaactgattccccatcttcacagtcgcttgttggatcatgaactcattcactaccgataaactcgcgtgattcacttccaattccagctccttgagtgcttccatgaacttagcaccaggatgattcttcttagcgcattggatcctaatcatcgcatcccaaccaatgatcttcacatctatctccacctctatggacacacctgaatcttgatccaaacacttttgatctttaaccaaacttttcacattcccatcccccacctctttgctcatcccatcaatctgcttctgcaactcctctttatcagcttcagccttttgcagcttagctttaagctcattgatatacgagatcgcgtctcctagaagagaagctttatccatcttagacacattaggaaccacagctctcagagagtagaatctctggttcagcttctctcttctctgtctctctgcctccacgtgattcaacggctcctctcttccgttagccggtttcctccctcgtttcctcggtttcttctccgtctcagccacgattctaccactctccgcttctttaacaaccgaagcttcgagatcagagcgattcgagtcgttcgatttcgtaggaagtggaagaacagaagtgaaagacagcatctcttcttccttgtcggaaaccaaacatctcttcttcttgttgctgtctccctccacaaacccagaactcgagatttgcgggttctgctgctgcttagggtgttccactgagcttccattacaaagcttcgaagccgtctgagaatcagagttagaagtcgccggagccccaagaaccggttcgatcccggttacaatcggttcattaatccacgtggcggaatcattctctccttgatccgggttcaaattaaactcccaagaacccgactcgcctccaccaccgccaccgttgaaactgaaaaagctgttgactttctcaacgagatccgagctctgatgtataatctccaacgaaccaagctcaacgacgccgttttgcgtcggtatacaaaccatcgtctccaacccgtaaacctgaccctggcgagctctctcgcagctcgatccagccaaggcgttcgagccagagagccaaatggtccgcgagctcgagaaagctcggccgggcaaaccagagccgttgacgaagctctgcgtcatcgaaaccaagaagaaccattccgtatccgacacgtcttcgtctcccgcctcgtcggaggagccgccgctgctgctgactgtccctcctccgccggagatcagagagttgagctctcgaatcactctcttccgatgctcttgctccgccgcgctgacgggattgggcttcctcttcctcgacttcctctcctcctcgcctttgtagtagccatcgccccaggttagcagcgccgccgtgttgctgatgtcttctccggcgaagtcgtgggatagttgccagaacacggcgtacgtccagctttctctagctccttcgatcaatgcttggagtcgttgctggagagtgtcttcggtgacgtgaggaggaggaggagtgagagggggttgaggccagagagaagagtgttcggagccgatgagaggttccattacagacgcattgtcttcgattgttgaccagaggtttgtgccgtttgttgactggttgaggtggtggtcggttagttgaacatttgtcgaagacat

SEQ ID NO: 22 - protein, 586 aa, Brassica oleracea
MSSTNVQLTDHHLNQSTNGTNLWSTIEDNASVMEPLIGSEHSSLWPQPPLTPPPPHVTEDTLQQRLQALIEGARESWTYAVFWQLSHDFAGEDISNTAALLTWGDGYYKGEEERKSRKRKPNPVSAAEQEHRKRVIRELNSLISGGGGTVSSSGGSSDEAGDEDVSDTEWFFLVSMTQSFVNGSGLPGRAFSSSRTIWLSGSNALAGSSCERARQGQVYGLETMVCIPTQNGVVELGSLEIIHQSSDLVEKVNSFFSFNGGGGGGESGSWEFNLNPDQGENDSATWINEPIVTGIEPVLGAPATSNSDSQTASKLCNGSSVEHPKQQQNPQISSSGFVEGDSNKKKRCLVSDKEEEMLSFTSVLPLPTKSNDSNRSDLEASVVKEAESGRIVAETEKKPRKRGRKPANGREEPLNHVEAERQRREKLNQRFYSLRAVVPNVSKMDKASLLGDAISYINELKAKLQKAEADKEELQKQIDGMSKEVGDGNVKSLVKDQKCLDQDSGVSIEVEIDVKIIGWDAMIRIQCAKKNHPGAKFMEALKELELEVNHASLSVVNEFMIQQATVKMGNQFFTQDQLKAALMERV

SEQ ID NO: 23 - DNA, 2100 bp, Oryza sativa
atgaacctttggacggacgacaacgcgtcgatgatggaggcgttcatggcctccgccgacctcccggccttcccgtggggggcggcctccaccccgccgccgccgccgccgccgcctcaccaccaccaccaacagcagcagcagcaggtcctgccgccgcctgcagcagctccggcggcggcggcgttcaaccaggacacgctgcagcagcggctgcagtcgatcatcgaggggtctcgggagacgtggacgtacgccatcttctggcagtcctccatcgacgtctccaccggcgcctccctcctcggctggggcgacggctactacaagggctgcgacgacgacaagcgcaagcagcgctcctccacccccgccgccgccgccgagcaggagcaccgcaagcgcgtcctccgcgagctcaactccctcatcgccggcgcaggcgccgcccccgacgaggccgtcgaggaggaggtcaccgacaccgagtggttcttcctcgtctccatgacccagtccttccccaacggcctcggcctccccggccaggccctcttcgccgcccagcccacctggatcgccaccggcttgtcctccgccccctgtgaccgcgccaggcaggcctacaccttcggcctccgcaccatggtctgcctccccctcgccaccggcgtcctcgagctcggctccaccgacgtcatcttccagaccggggacagcatccccaggatccgcgccctcttcaacctcagcgccgccgccgcctcctcctggcccccccaccccgacgccgcctccgccgatccctccgtgctctggctcgccgacgcgccccccatggacatgaaggactccatctccgccgcagacatctccgtctccaagccaccacccccgccgccgcaccagatccagcacttcgagaacgggagcaccagcacgctcacggagaatcccagcccgtcggtgcacgcgccgacgccctcgcagccggccgcgccgccccagcggcagcagcagcagcagcagagcagccaggctcagcagggccccttccgccgggagctcaacttctccgacttcgcgtccaacggcggcgccgcggccccgcctttcttcaagcccgagaccggcgagatcctaaacttcggcaacgacagcagcagtggccggaggaatccgtcgccggcgcccccggccgccaccgccagcctcaccaccgcgccggggagcctgttctcgcagcacacgccgacgctgacggcggcggcgaacgacgccaagagcaacaaccagaagaggtccatggaggccacctcccgcgccagcaacaccaacaaccacccggcggcgacggcgaacgaggggatgctgtccttctcgtcggcgccgacgacgcggccgtcgacggggacgggcgccccggccaagtcggagtcggaccactcggacctggaggcgtcggtgcgggaggtggagagcagccgcgtggtggcgccgccgccggaggcggagaagcggccgcggaagcgcgggcggaagccggcgaacgggcgggaggagccgctgaaccacgtggaggcggagcggcagcggcgggagaagctcaaccagcgcttctacgcgctgcgcgccgtggtgcccaacgtgtccaagatggacaaggcgtcgctgctgggcgacgccatctcctacatcaacgagctccgggggaagctcacggcgctggagacggacaaggagacgctgcagtcgcagatggagtcgctcaagaaggagcgggacgcgcggccgccggcgccgtcgggcggcggcggagacggcggggcgcggtgccacgcggtggagatcgaggccaagatccttgggctggaggccatgatccgcgtgcagtgccacaagcggaaccacccggcggcgcggctgatgacggcgctgcgggagctggacctggacgtgtaccatgccagcgtctccgtggtcaaggacctcatgatccagcaggtggccgtcaagatggccagccgcgtctactcgcaggaccagctcaacgccgcgctctacacccgcatcgccgagcctggcaccgccgcccggtaa

SEQ ID NO: 24 - protein, 699 aa, Oryza sativa
MNLWTDDNASMMEAFMASADLPAFPWGAASTPPPPPPPPHHHHQQQQQQVLPPPAAAPAAAAFNQDTLQQRLQSIIEGSRETWTYAIFWQSSIDVSTGASLLGWGDGYYKGCDDDKRKQRSSTPAAAAEQEHRKRVLRELNSLIAGAGAAPDEAVEEEVTDTEWFFLVSMTQSFPNGLGLPGQALFAAQPTWIATGLSSAPCDRARQAYTFGLRTMVCLPLATGVLELGSTDVIFQTGDSIPRIRALFNLSAAAASSWPPHPDAASADPSVLWLADAPPMDMKDSISAADISVSKPPPPPPHQIQHFENGSTSTLTENPSPSVHAPTPSQPAAPPQRQQQQQQSSQAQQGPFRRELNFSDFASNGGAAAPPFFKPETGEILNFGNDSSSGRRNPSPAPPAATASLTTAPGSLFSQHTPTLTAAANDAKSNNQKRSMEATSRASNTNNHPAATANEGMLSFSSAPTTRPSTGTGAPAKSESDHSDLEASVREVESSRVVAPPPEAEKRPRKRGRKPANGREEPLNHVEAERQRREKLNQRFYALRAVVPNVSKMDKASLLGDAISYINELRGKLTALETDKETLQSQMESLKKERDARPPAPSGGGGDGGARCHAVEIEAKILGLEAMIRVQCHKRNHPAARLMTALRELDLDVYHASVSVVKDLMIQQVAVKMASRVYSQDQLNAALYTRIAEPGTAAR

SEQ ID NO: 25 - DNA, 2163 bp, Rheum australe
atgatgaacctctggagttccgatgataacgttgctttcgccgacgcttttatgtccttggactcttcctccgccgccgcctggcctccggcgccttcctcccaccaatacaaccaccagtacaacctccaacaccagcaacaactgcagcatcaaccacaacaacaacaacaacaacaacagatggccaattcggccggcggtggttggcaacaagcgatggccggcggcgctcagatgaatccggcgcagatgatgaaccaggacagcctacagcagcggctgcaggcgctgatcgacgacgccagggagagctggacctacgccatcttctggcagtgcaacgtcgagcccaccggccagtctctccttggctggggcgacggatactataagggcgatgactccgccaataagaacgcctcctccgccgcccccgccgctggatccaggccgccgaagaaccccgcagaacaggagcacaggaggagagtcctccgggaactcaattccctgatctccggctcctcttcccctcaaaacgacgccgttgacgacgacgtcaccgacaccgagtggttcttccttatctccatgacgcaggctttccccttcggcgtcgatctccccggccaagccatcctcggatccaaccctatctgggcgtacggctccgaccgtctcgccggctccccgtgggatcgggccagacaaggggctgcgttcgggttgcagacgatcgtctgcatccccagcggcaccggcgtcctcgaattaggctccaccgaactcgtcttcaacagttccgttttgatgaataaggttagggttttgttcaatttcggatctggagatgcgagtctcctgaccgccgcagcctcctcctccgcccctgccgccgctcctccaccgccgatctcaacggcgacgaccgatgaggcggagaacgaccccgccgcgctgtggatcagcgatccgtcttcctccgcagccgaggtgaaggaggcattgaaccctaggatcaccgtccgtgagagctcgattccgatcggatcgaattcgattcccgtccaccagccggccaaaccgccgcaattggacgttcaaagctcaatcggattgacggagaattcaattggtatccatagccagaagagtcacaatcagccactccaacatcaaggatttttcaccaaagagttgaatttctccgagtttgcgatgaagccagaatccggagagatcctcaactttggggagagtaagaggaattccctcggcaacggaaacggattgaattcgcaattccttgtggaagagagcaacaaaaacatcatcagcaagaagcgatctccgacctcaagaggaagcgcagaggaaggcatgctttcattcacttcaagcgtggtcttgccttcttccatggcggtgaagtcaagcgccaccggcgcaggggactccgaccactctgacctggaagcttcggtggtgaaggaagccgacagcagccgggtggtggaccccgagaagcggccccgaaagcgtggccggaagccagcaaacggcagggaggagcccctgaaccatgtcgaagcggagaggcagaggagggagaagctcaaccagagattctacgccctcagggcggttgtccccaatgtgtcaaaaatggacaaagcatcactcttaggagacgcaatctccttcattaacgagctaaaatcgaagctccaaaacgtggaatcagagaaggaaacattgctgagccaggtggagtgtttgaagacagaggtgttagcaagcagagatcatcaatcaaggtcctccaatggaggaggaggagtacagaaccaccaccatccaagcctagaacaggacatgaatatgctgaatggaagctgtaagcagtcagatttggacgtggacgtcaagatcattggaagggatgccatggttagagtgaactgcagcaagagcaaccacccagctgcaaggctaatggtggcattgaaggagcttgacttggaagttacgcacgcgagcgtttcggttgtcaatgatctgatgatccagcaggcgacggtgaggatggggagccggtattacagcccggatcatcttaggatggtcttagaagccaaggtttctgatatcaggggatga

SEQ ID NO: 26 - protein, 720 aa, Rheum australe
MMNLWSSDDNVAFADAFMSLDSSSAAAWPPAPSSHQYNHQYNLQHQQQLQHQPQQQQQQQQMANSAGGGWQQAMAGGAQMNPAQMMNQDSLQQRLQALIDDARESWTYAIFWQCNVEPTGQSLLGWGDGYYKGDDSANKNASSAAPAAGSRPPKNPAEQEHRRRVLRELNSLISGSSSPQNDAVDDDVTDTEWFFLISMTQAFPFGVDLPGQAILGSNPIWAYGSDRLAGSPWDRARQGAAFGLQTIVCIPSGTGVLELGSTELVFNSSVLMNKVRVLFNFGSGDASLLTAAASSSAPAAAPPPPISTATTDEAENDPAALWISDPSSSAAEVKEALNPRITVRESSIPIGSNSIPVHQPAKPPQLDVQSSIGLTENSIGIHSQKSHNQPLQHQGFFTKELNFSEFAMKPESGEILNFGESKRNSLGNGNGLNSQFLVEESNKNIISKKRSPTSRGSAEEGMLSFTSSVVLPSSMAVKSSATGAGDSDHSDLEASVVKEADSSRVVDPEKRPRKRGRKPANGREEPLNHVEAERQRREKLNQRFYALRAVVPNVSKMDKASLLGDAISFINELKSKLQNVESEKETLLSQVECLKTEVLASRDHQSRSSNGGGGVQNHHHPSLEQDMNMLNGSCKQSDLDVDVKIIGRDAMVRVNCSKSNHPAARLMVALKELDLEVTHASVSVVNDLMIQQATVRMGSRYYSPDHLRMVLEAKVSDIRG

SEQ ID NO: 27 - DNA, 2109 bp, Zea mays
ggcacgagggacgacaacgcctccatgatggaggccttcatggcttctgccgacctccccaccttcccctggggagcgccggccgggggcggcaactcgtcggccgccgcggcgtcgccgccgccgcagatgccagcggcgatggctcccgggttcaaccaggacacgctgcagcagaggctacaagccatgatagaggggtcgagggagacctggacctacgccatcttctggcagtcctcccttgactccgccaccggcgcctcgctgctcggctggggggacggctactacaagggctgcgacgaagacaagcgcaagcagaagccgctcacgccctccgcccaggccgagcaggagcaccgcaagcgcgtgctccgcgagctcaactccctcatctccggcgcggcggcggctcccgacgaggccgtcgaggaggaggtcaccgataccgagtggttcttcctcgtctccatgacgcagtcgtttctcaacggttcgggcctccccgggcaggcgctcttcgccgggcagcccacatggatcgcctctggcctctcctccgcgccgtgcgagcgcgcgcgtcaggcctacaacttcggcctccgcaccatggtatgcttccccgtcggcaccggggtgctcgagctcggctccaccgacgtcgtgttcaagaccgccgagagcatggctaagatccgctcgctctttgggggcggagcagggggtggctcgtggccgcccgtgcagcctcaggcgccgtcgtcgcagcagcccgccgccggagccgaccacgcggagacggacccgtccatgctatggctcgccgacgcgccggtcatggacatcaaggattccttgtcgcacccgtcggccgagatctccgtctccaagcctccgccgcatccgccgcagatccattttgagaacgggagcacgagcacgctcacggagaaccccagcccctccgtgcacgcgccgccacccccgccggcgccggctgctccacagcagcggcagcaccagcaccagaatcaggcgcaccagggcccgttccgccgggagctcaatttctcggacttcgcgtccactccttccttggcggcgaccccgccgttcttcaagcccgagtccggcgagatcctcagcttcggcgccgacagcaacgcccggaggaacccgtcgccggtacctcccgccgccaccgccagcctcaccaccgctcccgggagcctcttctcgcagcacacggcgaccatgacggccgccgcggcgaacgacgcgaagaacaacaacaagcgctcaatggaggccacctcccgggcgagcaacaccaaccaccacccggcggcgacggcgaacgagggcatgctgtccttctcgtcggcgccgactacgcggccgtcgacgggcacgggcgcgccggccaagtcggagtccgaccactcggacctggacgcgtctgtgcgcgaggtggagagcagccgcgtggtggcgccgccaccggaggcggagaagcggccgcgaaagcgcgggcggaagcccgcgaacgggcgcgaggagccgctgaaccacgtggaggcggagcggcagcggcgggagaagctgaaccagcgcttctacgcgctgcgcgccgtggtgcccaacgtgtcgaagatggacaaggcgtcgctgctcggcgacgccatctcctacatcaacgagctccggggcaagctgacgtcgctggagaccgacaaggagacgctgcagacccaggtggaggcgctcaagaaggagcgcgacgcgcggccgccctcgcactccgctgggctcggcgggcacgacggcgggccgcgctgccacgcggtggagatcgacgccaagatcctggggctggaggccatgatccgcgtgcagtgccacaagcgcaaccacccgtcggcgcggctgatgacagcgctccgcgagctcgacctggacgtgtaccacgccagcgtgtccgtcgtcaaggacctcatgatccagcaggtcgccgtcaagatggccagccgcgtgtacacgcaggaccagctcagcgccgcgctctacagccgcctcgcggagcccgggtctgccatgggcaggtaa

SEQ ID NO: 28 - protein, 702 aa, Zea mays
GTRDDNASMMEAFMASADLPTFPWGAPAGGGNSSAAAASPPPQMPAAMAPGFNQDTLQQRLQAMIEGSRETWTYAIFWQSSLDSATGASLLGWGDGYYKGCDEDKRKQKPLTPSAQAEQEHRKRVLRELNSLISGAAAAPDEAVEEEVTDTEWFFLVSMTQSFLNGSGLPGQALFAGQPTWIASGLSSAPCERARQAYNFGLRTMVCFPVGTGVLELGSTDVVFKTAESMAKIRSLFGGGAGGGSWPPVQPQAPSSQQPAAGADHAETDPSMLWLADAPVMDIKDSLSHPSAEISVSKPPPHPPQIHFENGSTSTLTENPSPSVHAPPPPPAPAAPQQRQHQHQNQAHQGPFRRELNFSDFASTPSLAATPPFFKPESGEILSFGADSNARRNPSPVPPAATASLTTAPGSLFSQHTATMTAAAANDAKNNNKRSMEATSRASNTNHHPAATANEGMLSFSSAPTTRPSTGTGAPAKSESDHSDLDASVREVESSRVVAPPPEAEKRPRKRGRKPANGREEPLNHVEAERQRREKLNQRFYALRAVVPNVSKMDKASLLGDAISYINELRGKLTSLETDKETLQTQVEALKKERDARPPSHSAGLGGHDGGPRCHAVEIDAKILGLEAMIRVQCHKRNHPSARLMTALRELDLDVYHASVSVVKDLMIQQVAVKMASRVYTQDQLSAALYSRLAEPGSAMGR

SEQ ID NO: 29 - DNA, 1731 bp, Physcomitrella patens
atgtcgcagttattgaatgcgtgggaagtagcggactcagctatgatcgaggcgttcatgggaacggggtataactgcgtggaaggcttcgaagtgcaggatgatccggacgggcagctccacttgaacgagtcggtgttgctgcggaggctgcactcgctggtcgaagagagtaccgtggattggacgtatgcaatcttttggcagctgtcagccttacgtgaaggggagatgatgctcggttggggtgatgggtacttcaggagtgctaaggagaatgaaatcaacgacgcgaggaacatgaagggtggttctcaagaggaggatcaacagatgaggcgaaaggtgttgcgagagctgcaggctctagtcaatggctctgaagatgatgttagcgactatgtcacggatacggaatggttttaccttgtttcgatgtctcattcttatgcagccggagtggggactcctggacgagcattagcatctgacagacctgtgtggctaattggagcgaacaaagctcctgataataactgcagtcgtgttcaattggctaaggtacacagttcaatgatccttcagacaatcctttgtattccgtcgaaatctggtgtcgttgagcttggatcgacagatctggcaaaaagctgggaagttgttcagaatgtcaagatggtttttgatgaaccaatgatgtgggcagcccatgaaatccaagcggtggcgcattccttgcctttgagtagcgacgcgactagtatgcgaccgtcaagcccaagtcttatgtcaatagcaacaataagtgcttcaatttcaaatgcaagtcagattggcagatgttcaaatccaagtcaagatcatgaagcacattttgttggaaggaagaatccaccctcgtcaagacccccgatgaggttctacaaaccacgggtggaagaattgagctcggacactccagaaacaaacttggttgataataaatatattgtagggaagtcagtatctttccaccacctttctaagataggtcagagaggaatgcctggacctcctaccactgcaaataggttaccatgtttcgctccgtccgaggtagattgtcatgaatcagaagccgacgtttccgtcaaagaaaatgttgtggaatcaagtacaaatctcgagcctaaaccacgcaaaagagggcgcaagccggcaaacgatagggaagagccactaaatcatgtgcaagctgaacggcagcggcgagaaaaactcaatcagaaattttatgctctacggtctgtagtgccaaacgtgtccaagatggataaggcatccttattagaagatgccattacctacattaatgagcttcaagaaaagctacaaaaagcagaggctgaattgaaggttttccaaaggcaagtgcttgcatcaactggcgaatctaaaaaacctaatccatctcgcagggattcgaccgaaagttctgatgaagaacgtttcagacttcaagagagtggtcagagatcggcacctcttgttcacacttctgaaaataaacctgtaattagtgtttttgttcttggagaagaagctatgattcgagtttattgcacaagacactctaactttatagttcatatgatgtcggcattggaaaagctacgcttagaggttatacattcaaacacttcatccatgaaggatatgcttcttcacgtcgtgattgtcaaggtgcgctga

SEQ ID NO: 30 - protein, 576 aa, Physcomitrella patens
MSQLLNAWEVADSAMIEAFMGTGYNCVEGFEVQDDPDGQLHLNESVLLRRLHSLVEESTVDWTYAIFWQLSALREGEMMLGWGDGYFRSAKENEINDARNMKGGSQEEDQQMRRKVLRELQALVNGSEDDVSDYVTDTEWFYLVSMSHSYAAGVGTPGRALASDRPVWLIGANKAPDNNCSRVQLAKVHSSMILQTILCIPSKSGVVELGSTDLAKSWEVVQNVKMVFDEPMMWAAHEIQAVAHSLPLSSDATSMRPSSPSLMSIATISASISNASQIGRCSNPSQDHEAHFVGRKNPPSSRPPMRFYKPRVEELSSDTPETNLVDNKYIVGKSVSFHHLSKIGQRGMPGPPTTANRLPCFAPSEVDCHESEADVSVKENVVESSTNLEPKPRKRGRKPANDREEPLNHVQAERQRREKLNQKFYALRSVVPNVSKMDKASLLEDAITYINELQEKLQKAEAELKVFQRQVLASTGESKKPNPSRRDSTESSDEERFRLQESGQRSAPLVHTSENKPVISVFVLGEEAMIRVYCTRHSNFIVHMMSALEKLRLEVIHSNTSSMKDMLLHVVIVKVR

SEQ ID NO: 31 - DNA, 981 bp, Lycopersicon esculentum
agtggaaatggtcagagttgttacaatcagcaacaacagaagaatcctcctcagcaacaaacacaaggattcttcacgagggagttgaatttttcggaattcggtttcgatggaagtagtaataggaatggaaattcatcggtttcttgcaagcctgaatcaggagaaatcttgaattttggtgatagtactaaaaaaagtgcttccagtgccaatgtgaacttgtttacaggtcagtcccaattttggggcctgggggaggagaataataacaagaaccaagaaaagatcagctacttcaggggaagcaatgaagaaggaatgctttcatttgtttcaggtacagtttgcttcttcgggcatgaagtcaggtggaggcggaggcaagactctgaacattcagatctcgaggcttcagtggtgaaagaagctgatagtagtagagtggtagagcctgaaaagaggccaaggaagcgaggtagaaagccagcgaatggacgggaggagccattgaatcacgtcgaggcagagaggcaaaggagggagaaattgaaccaaagattcttctctcttagagctgttgtaccaaatgtgtctaagatggacaaggcatcactccttggagatgctatttcctatataaacgagttgaaatcgaagcttcaaaatacagagtcagataaagaagacttgaagagccaaatagaagatttaaagaaagaatcaaggcgccccggtcctcctccaccaccaaatcaagatctcaagatgtctagccacactggaggcaagattgtagacgtggatatagacgttaagatcatcggatgggatgcaatgattcgtatacaatgtaataaaaagaatcatccagcgaaggctaatggcagcgctcatggaattagacctagacgtgcatcatgccagtgtttcagttgtcaacgatttgatgatccaacaagccacagtgaaaatgggtag

SEQ ID NO: 32 - protein, 326 aa, Lycopersicon esculentum
SGNGQSCYNQQQQKNPPQQQTQGFFTRELNFSEFGFDGSSNRNGNSSVSCKPESGEILNFGDSTKKSASSANVNLFTGQSQFWGLGEENNNKNQEKISYFRGSNEEGMLSFVSGTVCFFGHEVRWRRRQDSEHSDLEASVVKEADSSRVVEPEKRPRKRGRKPANGREEPLNHVEAERQRREKLNQRFFSLRAVVPNVSKMDKASLLGDAISYINELKSKLQNTESDKEDLKSQIEDLKKESRRPGPPPPPNQDLKMSSHTGGKIVDVDIDVKIIGWDAMIRIQCNKKNHPAKANGSAHGIRPRRASCQCFSCQRFDDPTSHSENG

SEQ ID NO: 33 - DNA, 1476 bp, Populus trichocarpa
atggaggaactcattatttctccatcttcatcatcttcaccggtctccttatcccaagaaaccccaccgactctccaacaaaggcttcaattcatagtccaaaaccaaccagattggtggtcttatgccatattttggcaaacatcaaacgatgacagcggccgaatcttcctaggctggggtgatggccattttcaaggctctaaagatacttctcccaaaccaaacaccttcagcaatagccgcatgacgatatcaaactccgagaggaaaagggtcatgatgaagggaatccaatccctgatcggtgaatgtcacgatcttgatatgtctctgatggatggtaacgatgctaccgactctgagtggttctatgtcatgtcccttactcgatctttctcacctggagatggcatccttggcaaagcttatacaactggttctttgatttggttaactggtggccatgaacttcaattctacaactgtgaaagagtcaaagaagcacaaatgcatggcattgagaccctggtttgcatacctacatcgtgtggggttcttgaattaggatcctcttctgtgatcagagaaaattggggtcttgttcaacaagccaagtctctttttgggtcagatcttagcgcttatttggtgcccaaaggccctaataactccagtgaagaaccgacccagtttcttgacaggagcatttcttttgcggatatgggcataatagctggacttcaagaagattgtgcagttgatcgtgaacagaagaacgctcgtgaaacagaagaagcaaataaacgtaacgctaataaaccaggcctgtcttatttgaactcagagcattcagactcggactttcctctacttgctatgcatatggagaaaagaattccaaagaaaagagggagaaagcctggcctgggcagagacgccccactgaaccatgtagaggctgagaggcagcggagagagaagttgaaccaccggttttacgcgctgcgtgcggtggtcccaaacgtgtctagaatggacaaagcatcactattatctgatgctgtatcctacatcaatgaattgaaggcgaaggttgatgaattagagtcacaactagaaagggaatccaagaaagtgaaattggaagttgccgataatttggacaatcaaagcaccaccacttctgtggaccaatcagcctgcaggccgaatagtgctggtggcgctgggcttgcacttgaagttgagatcaagtttgtgggtaatgatgcaatgattagagtccaatcggagaatgtgaactatccagcttccaggttaatgtgtgcgctccgtgaactggagtttcaggttcaccatgctagtatgtcctgtgttaacgagcttatgctccaagatgtggtagttagggttcctgatggactgagaaccgaagaggccttgaaatctgctcttcttggaagactagaataa

SEQ ID NO: 34 - protein, 491 aa, Populus trichocarpa
MEELIISPSSSSSPVSLSQETPPTLQQRLQFIVQNQPDWWSYAIFWQTSNDDSGRIFLGWGDGHFQGSKDTSPKPNTFSNSRMTISNSERKRVMMKGIQSLIGECHDLDMSLMDGNDATDSEWFYVMSLTRSFSPGDGILGKAYTTGSLIWLTGGHELQFYNCERVKEAQMHGIETLVCIPTSCGVLELGSSSVIRENWGLVQQAKSLFGSDLSAYLVPKGPNNSSEEPTQFLDRSISFADMGIIAGLQEDCAVDREQKNARETEEANKRNANKPGLSYLNSEHSDSDFPLLAMHMEKRIPKKRGRKPGLGRDAPLNHVEAERQRREKLNHRFYALRAVVPNVSRMDKASLLSDAVSYINELKAKVDELESQLERESKKVKLEVADNLDNQSTTTSVDQSACRPNSAGGAGLALEVEIKFVGNDAMIRVQSENVNYPASRLMCALRELEFQVHHASMSCVNELMLQDVVVRVPDGLRTEEALKSALLGRLE

SEQ ID NO: 35 - DNA, 878 bp, Triticum aestivum
atgaaaggccgtgggaacagaggactgctggtggagggagctcattgcttcccaatgtccagaaaggattgcagagtttcacttggagtcaggcccggggcctgaattctcaccagcagaagtttggcaatggtatactgatagtgagtaatgaagctacacacggcaacaatagaaccgcggacagctccactacaacacagtttcagcttcagaaagcacctcagctccagaaactaccacttcttcagaaaccaccacagctagtgaagccgctgcagatggtcaaccagcaacagctgcagccacaggcgcctaggcaaatagattttagtgcagggaccagttccaagtctggtgtcctggttacaagagcagctgttcttgatggagatagttcagaggtgaatggcttgtgtaaagaggaagggacaacacctgtcatagaggaccgacggccaaggaagaggggaagaaagcctgcgaatgggagagaggagccgctgaatcatgttgaggctgagcgtcaaaggagggagaagctcaaccagcggttctatgcgttgagagccgttgtgcccaacatctcgaaaatggacaaggcttccctgctgggcgatgcaatagcatacatcactgaccttcagaagaagctcaaagatatggagacggagagagaacgatttcttgagtctggtatggtggatccaagggagcgagcccctagaccagaggttgacatccaggtggtgcaagacgaggttctggttcgagttatgtctccattggagaaccatccggtaaagaaggtctttgaagcgtttgaagaggcggacgtccgggtaggggagtcgaaactcacaggcaacaatggaacg

SEQ ID NO: 36 - protein, 292 aa, Triticum aestivum
ERPWEQRTAGGGSSLLPNVQKGLQSFTWSQARGLNSHQQKFGNGILIVSNEATHGNNRTADSSTTTQFQLQKAPQLQKLPLLQKPPQLVKPLQMVNQQQLQPQAPRQIDFSAGTSSKSGVLVTRAAVLDGDSSEVNGLCKEEGTTPVIEDRRPRKRGRKPANGREEPLNHVEAERQRREKLNQRFYALRAVVPNISKMDKASLLGDAIAYITDLQKKLKDMETERERFLESGMVDPRERAPRPEVDIQVVQDEVLVRVMSPLENHPVKKVFEAFEEADVRVGESKLTGNNGT

SEQ ID NO: 37 - DNA, 2054 bp, Populus sp.
tgaaaaaaaaaaacacatctgctttctgggatgactgattaccgactaccgccgacaatgaatctatggacggacgacaacgcgtctgtaatggaagcatttatgaactcctccgatctctcttctctttgggcaccgcctccgcaatcttccgcctccacttccacgccatcagcagcagcacagccatctgagaaaactatgttgaaccaagaaacactccagcaacgccttcagacattaattgaaggcgcgtgtgagggctgggcttatgctattttctggcaatcctcttatgattattctggcgcctccgtcctaggatggggcgacggttattataaaggggaggaagataaaggaaaaactagaacgagaaattcggcatcatcagctgttgaacaggagcatcgtaaaacggtgctccgtaagctgaattcgttgattgctggacctaattctgttactgatgatgctatcgatgaagaggttactgatactgagtggttttttcttgttagcatgactcagtctttcgttaatggaagtgggttacctggtcaagctcttttcaatgggagtccggtttgggttgctgggtcggagaggttgggggcttcgccgtgtgaaagagccaggcagggtcaggtttttgggttacagactttagtttgtataccgtctgccagtggtgttgttgaattgggttctactgaattgatttttcaaagctcggatctgatgaataaggttagggttttgttcgattttaatagtttggaggtggtttcttggccgattggaactacaaatactgatcagggtgagaacgacccgtcttcgttttggcttactgatccagaaactaaagatggaaatggtgggattccttggaatctgaacgggagtgatcaaaacaagaacaatcatcatagttctaatcagagttcgagtagcttgactgatcatctgggtggaattcatcatgctcagaatcatcaacagcagccgattcatgctcgaagtcttttcactcgagagttgaattttggggagtgcagcacatatgatgggagtagtgttagaaatggaaattcccatttgacgaagccagaatctggagagatattgaattttggggagagtaagaggactgcttccagtgcaaatgggaatttctattcgggtttggtgacagaggagaataataagaagaagagatcagttggtaatgaagaagggatgctttcatttacttctggtgtgattttaccttcttcttgtatcctgaaatccagtggcggtacaggaggggattcagatcactctgatcttgaggcttcggttgtaaaagaggcggatagcagcagggttgtggaaccagaaaagaggccacgaaaacgagggagaaaacctgccaatggaagagaagagcctttgaatcatgttgaagcagagaggcaaagaagagagaaacttaatcagaggttttatgcactgcgagctgtggttcctaatgtatcaaagatggacaaagcttcacttcttggggatgccatatcatatatcgacgagcttagaacgaagctgcaatctgccgagtctagcaaggaggagttggagaagcaagtggaatcaatgaagagggagttagtaagcaaggattcaagtcctccacctaaagaggagctcaagatgtcaaataacgaaggagttaaactgatagacatggatatcgatgtgaagataagtggatgggatgcgatgatacgaatccaatgttgtaaaaagaaccaccctgctgctaggctaatgtcggctttgagagacctggaccttgatgttcagtatgccaatgtgtctgtgatgaatgatttgatgatccagcaagccacggtgaagatggggagtcggttttacacgcaagaagagcttagggtagccatatcaacaaatgttggtggcgtccattaggcattgaacagaacaacaaatgcaattagcagttgggatagatcctggtaaagattacaggttccgactttatttattaa

SEQ ID NO: 38 - protein, 647 aa, Populus sp.
MTDYRLPPTMNLWTDDNASVMEAFMNSSDLSSLWAPPPQSSASTSTPSAAAQPSEKTMLNQETLQQRLQTLIEGACEGWAYAIFWQSSYDYSGASVLGWGDGYYKGEEDKGKTRTRNSASSAVEQEHRKTVLRKLNSLIAGPNSVTDDAIDEEVTDTEWFFLVSMTQSFVNGSGLPGQALFNGSPVWVAGSERLGASPCERARQGQVFGLQTLVCIPSASGVVELGSTELIFQSSDLMNKVRVLFDFNSLEVVSWPIGTTNTDQGENDPSSFWLTDPETKDGNGGIPWNLNGSDQNKNNHHSSNQSSSSLTDHLGGIHHAQNHQQQPIHARSLFTRELNFGECSTYDGSSVRNGNSHLTKPESGEILNFGESKRTASSANGNFYSGLVTEENNKKKRSVGNEEGMLSFTSGVILPSSCILKSSGGTGGDSDHSDLEASVVKEADSSRVVEPEKRPRKRGRKPANGREEPLNHVEAERQRREKLNQRFYALRAVVPNVSKMDKASLLGDAISYIDELRTKLQSAESSKEELEKQVESMKRELVSKDSSPPPKEELKMSNNEGVKLIDMDIDVKISGWDAMIRIQCCKKNHPAARLMSALRDLDLDVQYANVSVMNDLMIQQATVKMGSRFYTQEELRVAISTNVGGVH

SEQ ID NO: 39 - DNA, 1827 bp, Vitis vinifera
atgaaaactgaaatgggtatgggaggaggggcttggacggaggaggataaagcgatggtggcggctgttttgggaactcgagcatttgattacttgatgaccagctccgttgtgagtgagaatctgttaatggcagtggggagtgatgaaaatttgcagacaaagctttcggatctcgtagaccgaccaaatgcatccaatttcagttggaattatgcaattttctggcaaatttcacagtccaagtctggggattgggtgcttggatggggagatgggtcttgtagggagcccagggaaggggaggaatccgaagtgacccgaattttaaatattcggctcgaggatgcaacccagcagaggatgaggaaaagggtgcttcagaagctgcatacattgtttggaggctcggatgaggacagttatgcttttggattggaccgagtcactgatactgaaatgttttttctcgcttccatgtacttctcatttaccagaggagaaggtggcccagggaaatcttttggatctgggaagcatttgtggctgtctgatgcattgaaatctccatcagattattgtgttcgatcattccttgccaaatctgctggaattcagaccattgtgttaatcccaactgatgttggggttgtagagctgggttctgtgaggtcattacctgaaagcttagagatgttgcagactataagatcatcattctcgatgtatttgccattcatcaggggcaagccagccttaccagtgttgaacgagaagaaaaatgaaagtgctcctttttccaatctggggactggggagcgagtagagggaattccaaagatttttgggcaggatttgaactcaggtcattcccattttagggagaaacttgctgttcgaaaggcagaagagaggccatgggacagctaccaaaacgggaacaggcttccttttacgaacactagaaatggttttcatggttcgggctggccacacatgcagggtgtgaaaccagcaagtacggcagaaatgtacagtcctcaggtcccaatcaataatctacatgagatggttaatggggttagagaggagtttcggcttagccagttccagcctcccaagcaggtgcagatgcaaattgattttgcaggggctgcttcaaggtctaccatgttggctcggccaattagtgtggagtctgagcattcagatgtcgaggcttcatgcaaggatgagcggccaggcccagctgatgaaaggaggccccggaaaaggggcagaaagcctgcaaatggaagagaagaacccctcaatcatgtggaagcagagaggcagaggcgtgagaaactgaaccagcggttttatgcattgcgagctgttgtgcccaacatctccaagatggacaaagcctccttgctgggagatgcaattacttacatcaccgagctccagaagaaactcaaggacatggaatcagagcgggagaaatttgggagcacttcaagagatgcattatctttggaaactaacaccgaggcagaaactcatatacaggcgtctgatgtcgatatccaagcagccaatgatgaagttattgtgagagtaagctgcccactggatacccaccctgtatcaagagtcatccaaacattcaaggaggcacagatcacagtgatcgagtcgaaacttgctacagacaatgatactgtgttacatacttttgtaatcaagtcccagggatccgagcagctgatgaaggaaaagctcacagctgcattttcgcgcgaatccaattctttacagcctttgtcatcatcagttgggtaa

SEQ ID NO: 40 - protein, 608 aa, Vitis vinifera
MKTEMGMGGGAWTEEDKAMVAAVLGTRAFDYLMTSSVVSENLLMAVGSDENLQTKLSDLVDRPNASNFSWNYAIFWQISQSKSGDWVLGWGDGSCREPREGEESEVTRILNIRLEDATQQRMRKRVLQKLHTLFGGSDEDSYAFGLDRVTDTEMFFLASMYFSFTRGEGGPGKSFGSGKHLWLSDALKSPSDYCVRSFLAKSAGIQTIVLIPTDVGVVELGSVRSLPESLEMLQTIRSSFSMYLPFIRGKPALPVLNEKKNESAPFSNLGTGERVEGIPKIFGQDLNSGHSHFREKLAVRKAEERPWDSYQNGNRLPFTNTRNGFHGSGWPHMQGVKPASTAEMYSPQVPINNLHEMVNGVREEFRLSQFQPPKQVQMQIDFAGAASRSTMLARPISVESEHSDVEASCKDERPGPADERRPRKRGRKPANGREEPLNHVEAERQRREKLNQRFYALRAVVPNISKMDKASLLGDAITYITELQKKLKDMESEREKFGSTSRDALSLETNTEAETHIQASDVDIQAANDEVIVRVSCPLDTHPVSRVIQTFKEAQITVIESKLATDNDTVLHTFVIKSQGSEQLMKEKLTAAFSRESNSLQPLSSSVG

SEQ ID NO: 41 - protein, 663 aa, Oryza sativa
MEAFMASADLPAFPWGAASTPPPPPPPPHHHHQQQQQQVLPPPAAAPAAAAFNQDTLQQRLQSIIEGSRETWTYAIFWQSSIDVSTGASLLGWGDGYYKGCDDDKRKQRSSTPAAAAEQEHRKRVLRELNSLIAGAGAAPDEAVEEEALFAAQPTWIATGLSSAPCDRARQAYTFGLRTMVCLPLATGVLELGSTDVIFQTGDSIPRIRALFNLSAAAASSWPPHPDAASADPSVLWLADAPPMDMKDSISAADISVSKPPPPPPHQIQHFENGSTSTLTENPSPSVHAPTPSQPAAPPQRQQQQQQSSQAQQGPFRRELNFSDFASNGGAAAPPFFKPETGEILNFGNDSSTGRRNPSPAPPAATASLTTAPGSLFSQHTPTLTAAANDAKSNNQKRSMEATSRASNTNNHPAATANEGMLSFSSAPTTRPSTGTGAPAKSESDHSDLEASVREVESSRVVAPPPEAEKRPRKRGRKPANGREEPLNHVEAERQRREKLNQRFYALRAVVPNVSKMDKASLLGDAISYINELRGKLTALETDKETLQSQMESLKKERDARPPAPSGGGGDGGARCHAVEIEAKILGLEAMIRVQCHKRNHPAARLMTALRELDLDVYHASVSVVKDLMIQQVAVKMASRVYSQDQLNAALYTRIAEPGTAAR

SEQ ID NO: 42 - protein, 70 aa, Artificial sequence
  peptide sequence corresponding to Motif 7 in NP_001065478
PRKRGRKPANGREEPLNHVEAERQRREKLNQRFYALRAVVPNVSKMDKASLLGDAISYINELRGKLTALE

SEQ ID NO: 43 - protein, 70 aa, Artificial sequence; identical to SEQ ID NO: 42
  peptide sequence corresponding to Motif 7 in EAY79619

SEQ ID NO: 44 - protein, 70 aa, Artificial sequence
  peptide sequence corresponding to Motif 7 in AAD15818
PRKRGRKPANGREEPLNHVEAERQRREKLNQRFYALRAVVPNVSKMDKASLLGDAISYINELRGKLTSLE

SEQ ID NO: 45 - protein, 70 aa, Artificial sequence
  peptide sequence corresponding to Motif 7 in AAB00686
PRKRGRKPGNGREEPLNHVEAERQRREKLNQRFYALRAVVPNVSKMDKASLLGDAISYINELKSKLSELE

SEQ ID NO: 46 - protein, 70 aa, Artificial sequence
  peptide sequence corresponding to Motif 7 in ABD59338
PRKRGRKPANGREEPLNHVEAERQRREKLNQRFYALRAVVPNVSKMDKASLLGDAISYINELKLKLQGLE

SEQ ID NO: 47 - protein, 70 aa, Artificial sequence
  peptide sequence corresponding to Motif 7 in Pt29.195#1
PRKRGRKPANGREEPLNHVEAERQRREKLNQRFYALRAVVPNVSKMDKASLLGDAISYIDELRTKLQSAE

SEQ ID NO: 48 - protein, 70 aa, Artificial sequence
  peptide sequence corresponding to Motif 7 in CAF74710
PRKRGRKPANGREEPLNHVEAERQRREKLNQRFYALRAVVPNVSKMDKASLLGDAISYINELKSKLQNTE

SEQ ID NO: 49 - protein, 70 aa, Artificial sequence
  peptide sequence corresponding to Motif 7 in AAF04917
PRKRGRKPANGREEPLNHVEAERQRREKLNQRFFSLRAVVPNVSKMDKASLLGDAISYINELKSKLQNTE

SEQ ID NO: 50 - protein, 70 aa, Artificial sequence
  peptide sequence corresponding to Motif 7 in AAQ14332
PRKRGRKPANGREEPLNHVEAERQRREKLNQRFYALRAVVPNVSKMDKASLLGDAISYINELKAKLQTTE

SEQ ID NO: 51 - protein, 70 aa, Artificial sequence
  peptide sequence corresponding to Motif 7 in AAY90122
PRKRGRKPANGREEPLNHVEAERQRREKLNQRFYALRAVVPNVSKMDKASLLGDAISFINELKSKLQNVE

SEQ ID NO: 52 - protein, 70 aa, Artificial sequence; identical to SEQ ID NO: 9
  peptide sequence corresponding to Motif 7 in AAL55713

SEQ ID NO: 53 - protein, 70 aa, Artificial sequence
  peptide sequence corresponding to Motif 7 in ABD65632
PRKRGRKPANGREEPLNHVEAERQRREKLNQRFYSLRAVVPNVSKMDKASLLGDAISYINELKAKLQKAE

SEQ ID NO: 54 - protein, 70 aa, Artificial sequence
  peptide sequence corresponding to Motif 7 in ABK94979
PKKRGRKPGLGRDAPLNHVEAERQRREKLNHRFYALRAVVPNVSRMDKASLLSDAVSYINELKAKVDELE

SEQ ID NO: 55 - protein, 70 aa, Artificial sequence
  peptide sequence corresponding to Motif 7 in EDQ91347
PRKRGRKPANDREEPLNHVQAERQRREKLNQKFYALRSVVPNVSKMDKASLLEDAITYINELQEKLQKAE

SEQ ID NO: 56 - DNA, 4120 bp, Artificial sequence
  expression cassette
aatccgaaaagtttctgcaccgttttcaccccctaactaacaatatagggaacgtgtgctaaatataaaatgagaccttatatatgtagcgctgataactagaactatgcaagaaaaactcatccacctactttagtggcaatcgggctaaataaaaaagagtcgctacactagtttcgttttccttagtaattaagtgggaaaatgaaatcattattgcttagaatatacgttcacatctctgtcatgaagttaaattattcgaggtagccataattgtcatcaaactcttcttgaataaaaaaatctttctagctgaactcaatgggtaaagagagagattttttttaaaaaaatagaatgaagatattctgaacgtattggcaaagatttaaacatataattatataattttatagtttgtgcattcgtcatatcgcacatcattaaggacatgtcttactccatcccaatttttatttagtaattaaagacaattgacttatttttattatttatcttttttcgattagatgcaaggtacttacgcacacactttgtgctcatgtgcatgtgtgagtgcacctcctcaatacacgttcaactagcaacacatctctaatatcactcgcctatttaatacatttaggtagcaatatctgaattcaagcactccaccatcaccagaccacttttaataatatctaaaatacaaaaaataattttacagaatagcatgaaaagtatgaaacgaactatttaggtttttcacatacaaaaaaaaaaagaattttgctcgtgcgcgagcgccaatctcccatattgggcacacaggcaacaacagagtggctgcccacagaacaacccacaaaaaacgatgatctaacggaggacagcaagtccgcaacaaccttttaacagcaggctttgcggccaggagagaggaggagaggcaaagaaaaccaagcatcctcctcctcccatctataaattcctccccccttttcccctctctatataggaggcatccaagccaagaagagggagagcaccaaggacacgcgactagcagaagccgagcgaccgccttcttcgatccatatcttccggtcgagttcttggtcgatctcttccctcctccacctcctcctcacagggtatgtgcccttcggttgttcttggatttattgttctaggttgtgtagtacgggcgttgatgttaggaaaggggatctgtatctgtgatgattcctgttcttggatttgggatagaggggttcttgatgttgcatgttatcggttcggtttgattagtagtatggttttcaatcgtctggagagctctatggaaatgaaatggtttagggtacggaatcttgcgattttgtgagtaccttttgtttgaggtaaaatcagagcaccggtgattttgcttggtgtaataaaagtacggttgtttggtcctcgattctggtagtgatgcttctcgatttgacgaagctatcctttgtttattccctattgaacaaaaataatccaactttgaagacggtcccgttgatgagattgaatgattgattcttaagcctgtccaaaatttcgcagctggcttgtttagatacagtagtccccatcacgaaattcatggaaacagttataatcctcaggaacaggggattccctgttcttccgatttgctttagtcccagaattttttttcccaaatatcttaaaaagtcactttctggttcagttcaatgaattgattgctacaaataatgcttttatagcgttatcctagctgtagttcagttaataggtaatacccctatagtttagtcaggagaagaacttatccgatttctgatctccatttttaattatatgaaatgaactgtagcataagcagtattcatttggattattttttttattagctctcaccccttcattattctgagctgaaagtctggcatgaactgtcctcaattttgttttcaaattcacatcgattatctatgcattatcctcttgtatctacctgtagaagtttctttttggttattccttgactgcttgattacagaaagaaatttatgaagctgtaatcgggatagttatactgcttgttcttatgattcatttcctttgtgcagttcttggtgtagcttgccactttcaccagcaaagttcatttaaatcaactagggatatcacaagtttgtacaaaaaagcaggcttaaacaatgactgattaccggctacaaccaacgatgaatctttggaccaccgacgacaacgcttctatgatggaagctttcatgagctcttccgatatctcaactttatggcctccggcgtcgacgacaaccacgacggcgacgactgaaacaactccgacgccggcgatggagattccggcacaggcgggatttaatcaagagactcttcagcaacgtttacaagctttgattgaaggaacacacgaaggttggacctacgctatattctggcaaccgtcgtatgatttctccggcgcctccgtgctcggatggggagatggttattacaaaggtgaagaagataaagcaaacccgagacggagatcgagttcgccgccgttttctactccggcggatcaggagtacaggaaaaaagtgttgagagagcttaactcgttgatctccggtggtgttgctccgtcggatgacgctgttgatgaggaggtgacggatacggaatggtttttcttggtttcgatgacgcagagcttcgcttgcggtgcgggattagctggtaaagcgtttgcaacgggtaacgcggtttgggtttccgggtcagatcaattatccgggtcgggttgtgaacgggctaagcaaggaggagtgtttgggatgcatactattgcgtgtattccttcggcgaacggagttgtggaagtcgggtcaacggagccgatccgacagagttcggaccttattaacaaggttcgaattcttttcaatttcgacggcggagctggagatttatcgggtcttaattggaatcttgacccggatcaaggtgagaacgacccgtctatgtggattaatgacccgattggaacacctggatctaacgaaccgggtaacggagctccaagttctagctcccagcttttttcaaagtctattcagtttgagaacggtagctcaagcacaataaccgaaaacccgaatctggatccgactccgagtccggttcattctcagacccagaatccgaaattcaataacactttctcccgagaacttaatttttcgacgtcaagttctactttagtgaaaccaagatccggcgagatattaaacttcggcgatgaaggtaaacgaagctccggaaacccggatccaagttcttattcgggtcaaacacaattcgaaaacaaaagaaagaggtcgatggttttgaacgaagataaagttctatcattcggagataaaaccgccggagaatcagatcactccgatctagaagcttccgtcgtgaaagaagtagcagtagagaaacgtccaaagaaacgaggaagaaagccagcaaacggtagagaagagccactaaaccacgtcgaagcagagagacaaagacgcgagaaactaaaccaaagattctacgcgttacgagcggttgtaccaaacgtttcaaaaatggataaagcttcgttactcggtgacgcaatcgcttacatcaacgagcttaaatccaaagtagtcaaaacagagtcagagaaactccaaatcaagaaccagctcgaggaagtgaaactcgagctcgccggaagaaaagcgagtgctagtggaggagatatgtcgtcttcgtgttcttcgattaaaccggtggggatggagattgaagtgaagataattggttgggacgcaatgattagagttgaatctagtaagaggaatcatccggcggcgaggttgatgtcggcgttgatggatttggagttggaagtgaatcacgcgagtatgtcggtggttaacgatttgatgattcaacaagcgacggtgaagatgggttttaggatctatacgcaagaacagctcagagcaagtttgatttcaaaaatcggttaaaa

SEQ ID NO: 57 - DNA, 687 bp, Nicotiana tabacum
atggctcccattgaaggtgttattcaagtacagggtgatataacaaatgctaaaacagctgaagtggttattagacattttgacggatgcaaggctgacattgttgtctgtgatggtgcacctgatgtaacgggacttcatgacatggatgaatttgttcagtcccagctgatattggcgggcctaaccattgtcactcacatactaaaaggaggcggaaagttcatagcaaaaatttttcgaggaaaagacacaagccttctttactgtcagctaaaactatttttcacagaagtgacttttgctaagccaaaaagcagtcggaattctagcatagaggcatttgcagtttgcgagaattactctccacctgaaggatttaatgagaaagatcttcatcgccttcttgaaaagattggaagtccatctggcacagaggacctagattgcagtagtgcatggctggaaggtcctaataaggtgtatattccatttctggcttgtggagaccttagcgggtacgattcagaccgttcatatccacttcctaaagctgcagatggaacctatcagtgtttagatcctgtacaacctccaattgcaccgccatataaacgagctcttgaaatgaagaaagcgtcgaatcaaggaatccaaaacctagacaagctttctcttagctcctaa

SEQ ID NO: 58 - protein, 228 aa, Nicotiana tabacum
MAPIEGVIQVQGDITNAKTAEVVIRHFDGCKADIVVCDGAPDVTGLHDMDEFVQSQLILAGLTIVTHILKGGGKFIAKIFRGKDTSLLYCQLKLFFTEVTFAKPKSSRNSSIEAFAVCENYSPPEGFNEKDLHRLLEKIGSPSGTEDLDCSSAWLEGPNKVYIPFLACGDLSGYDSDRSYPLPKAADGTYQCLDPVQPPIAPPYKRALEMKKASNQGIQNLDKLSLSS

SEQ ID NO: 59 - DNA, 951 bp, Nicotiana tabacum
atgggaaaagcatcgagggacaaaagagatatttactatcggaaagcaaaggaagaaggatggcgtgcccgaagtgccttcaagctccttcagattgatgaggaatttaacatctttgaaggtgtgaagcgagttgtggatttgtgtgcagcaccaggcagctggagtcaggttttaagccggaagttatatctcccagcaaagttgtcacctgataccaaggacgacgatctaccacttattgtggctattgacttacagcctatggctcccattgaaggtgttattcaagtacagggtgatataacaaatgctaaaacagctgaagtggttattagacattttgacggatgcaaggctgacattgttgtctgtgatggtgcacctgatgtaacgggacttcatgacatggatgaatttgttcagtcccagctgatattggcgggcctaaccattgtcactcacatactaaaaggaggcggaaagttcatagcaaaaatttttcgaggaaaagacacaagccttctttactgtcagctaaaactatttttcacagaagtgacttttgctaagccaaaaagcagtcggaattctagcatagaggcatttgcagtttgcgagaattactctccacctgaaggatttaatgagaaagatcttcatcgccttcttgaaaagattggaagtccatctggcacagaggacctagattgcagtagtgcatggctggaaggtcctaataaggtgtatattccatttctggcttgtggagaccttagcgggtacgattcagaccgttcatatccacttcctaaagctgcagatggaacctatcagtgtttagatcctgtacaacctccaattgcaccgccatataaacgagctcttgaaatgaagaaagcgtcgaatcaaggaatccaaaacctagacaagctttctcttagctcctaa

SEQ ID NO: 60 - protein, 316 aa, Nicotiana tabacum
MGKASRDKRDIYYRKAKEEGWRARSAFKLLQIDEEFNIFEGVKRVVDLCAAPGSWSQVLSRKLYLPAKLSPDTKDDDLPLIVAIDLQPMAPIEGVIQVQGDITNAKTAEVVIRHFDGCKADIVVCDGAPDVTGLHDMDEFVQSQLILAGLTIVTHILKGGGKFIAKIFRGKDTSLLYCQLKLFFTEVTFAKPKSSRNSSIEAFAVCENYSPPEGFNEKDLHRLLEKIGSPSGTEDLDCSSAWLEGPNKVYIPFLACGDLSGYDSDRSYPLPKAADGTYQCLDPVQPPIAPPYKRALEMKKASNQGIQNLDKLSLSS

SEQ ID NO: 61 - DNA, 1128 bp, Arabidopsis thaliana
gaatttctactttggtgctgctcttcttcacatacctagctgctgtatactatacgtgaaccaactccgtattctactttagaggccatgggaaaagcttctcgagacaaaagggatatctattatcgtaaagctaaagaagaaggatggcgtgcaagaagtgcttttaagcttcttcagattgatgaagaatttaatatttttgaaggtgtgaagagggtcgtagatttatgtgctgcacctggtagctggagtcaggtcttgagtcgtcaattatatcttcctgcaaagtcctcagctgagtcaaaagatggggatcttcctcttatagtagccatcgatttgcagcctatggctccaattgaaggtgtcatccaggttcaaggggacataactaatgctcggacagaagtggtcattagacactttgacggctgcaaagcggacctggttgtctgtgatggtgctccagatgttactggtttgcatgacatggatgaatttgtccagtcccaactcatactagcaggattaacgattgtaactcatattcttaaagaaggtggaaaatttattgcaaagatattccgtggaaaagatacaagtctcttgtactgtcaactgaaattgtttttcccaaccgtaacttttgcgaaaccgaaaagcagccgcaattcaagtatagaggcttttgcagtctgcgagaattactctccgccagaaggatttaacccgagagatctgcatcgtctcttggagaaagtcggaagcccttcaggtggaagcgatctcgattgcagtagtggttggcttgaaggacccaacaaagtttatataccattcttggcatgtggtgacttaaccggttatgactcagaccggtcttacccactccctagagaagcagatggatcatcataccagagtttggacccgattcaacctcccatcgcaccgccttataaacgagctcttgagctcaagaaagcttcagcacaaagcttcaactcttgaagaaggtgataccaaaaaagaaaaaggaacaaacttttcattggattctgtagcctgtcgtaatgatatattcagggacctacaatttctataacgcttaatgtttttgttatg

SEQ ID NO: 62 - protein, 309 aa, Arabidopsis thaliana
MGKASRDKRDIYYRKAKEEGWRARSAFKLLQIDEEFNIFEGVKRVVDLCAAPGSWSQVLSRQLYLPAKSSAESKDGDLPLIVAIDLQPMAPIEGVIQVQGDITNARTAEVVIRHFDGCKADLVVCDGAPDVTGLHDMDEFVQSQLILAGLTIVTHILKEGGKFIAKIFRGKDTSLLYCQLKLFFPTVTFAKPKSSRNSSIEAFAVCENYSPPEGFNPRDLHRLLEKVGSPSGGSDLDCSSGWLEGPNKVYIPFLACGDLTGYDSDRSYPLPREADGSSYQSLDPIQPPIAPPYKRALELKKASAQSFNS

SEQ ID NO: 63 - DNA, 951 bp, Lycopersicon esculentum
atgggaaaagcatctagggataagagggatatttactaccggaaagcaaaggaagaagggtggcgtgcccgaagtgccttcaagctccttcagatagatgaggagtttaatatctttgaaggtgcgaagcgcgttgtggatttatgtgctgctccaggcagctggagtcaggttttaagccggaagttatatctcccagcaaagctgtcaccgggtaccaaggatgatgatctaccacttatcgtggctattgacttacagcctatggctccaattgaaggtgttattcaagtacagggtgatataacaaatgctaaaacagttgaagtggttattagacattttgatggatgcaaagctgaccttgttgtctgtgatggtgcacctgatgtaacgggacttcatgacatggatgaatttgttcaatcccaactgatattggcgggcctaaccatagtcactcacatactaaaagaaggtggaaagttcatagcaaaaatttttcgaggaaaagacacaagtctcctttactgtcaactaaaactatttttcacggaagtgacttttgctaagccaaaaagtagtcgcaattctagcatagaggcatttgcagtttgtgaaaactactctccacctgaaggattcaatgagaaagacctttatcgccttcttgaacaagttggaagtccatcaggcgctgaggacttagattgcagtagtggatggcttgaaggtcgtaacaaggtgtatatcccatttctggcttgcggagacctgagtggatatgattcagatcgttcatatccgcttcctaaatctgcagatggaacctatcaatgtttagatcctgtacaacctccgattgcaccaccgtataaacgagctcttgaaatgaaaaaagcttcaagtcaaggaattcataatctagacaaactttctcttgacccctga

SEQ ID NO: 64 - protein, 316 aa, Lycopersicon esculentum
MGKASRDKRDIYYRKAKEEGWRARSAFKLLQIDEEFNIFEGAKRVVDLCAAPGSWSQVLSRKLYLPAKLSPGTKDDDLPLIVAIDLQPMAPIEGVIQVQGDITNAKTVEVVIRHFDGCKADLVVCDGAPDVTGLHDMDEFVQSQLILAGLTIVTHILKEGGKFIAKIFRGKDTSLLYCQLKLFFTEVTFAKPKSSRNSSIEAFAVCENYSPPEGFNEKDLYRLLEQVGSPSGAEDLDCSSGWLEGRNKVYIPFLACGDLSGYDSDRSYPLPKSADGTYQCLDPVQPPIAPPYKRALEMKKASSQGIHNLDKLSLDP

SEQ ID NO: 65 - DNA, 951 bp, Medicago truncatula
atgggcaaagcttcaagggataagagggatatatattaccgaaaagcgaaagaagaaggttggcgtgctcgaagtgcttttaaacttcttcagatagatgaggaatttaacatttttgaaggggtgaaacgtgttgtagatttatgtgctgccccaggcagttggagtcaggttttgagtcgaaaactgtaccttccagccaagcttgcacctgatgcaaaggatgaaaatcttcctcttattgtagctattgatttgcagccaatggctccgattgaaggtgttatccaggtgcagggtgatataactaatgctcggaccgctgaagtggtcattagacatttcgatggttgcaaggccaaccttgttgtgtgtgatggtgctcctgatgttaccggacttcatgacatggatgaatttgttcaatcccaactcatacttgcagggttgacaattgttactcatgtactgaaggaaggagggaagttcattgcgaagatatttagaggaaaggacacaagccttctatactgtcagctaaaattatttttccctgtggtgactttcgcaaagccaaaaagtagccgtaattccagcatagaggcatttgcagtttgtgaaaactactcccctcctgaaggattcaacccgaaagatcttcaccgacttcttgagaaggttggaagtccatcaggcgtagatgatacagattgtgttagtgggtggttggaaggccctaataaggtgtatatcccatttctagcttgcggggacctcactggatatgattctgataggtcatatccactgcctaaagttgctgggggaacatatcagagcttggatccagtacaacctcctattgcccctccttacaagagagctctagagttaaaaaaagcatcacctcaaggattccgagaacttgaaaatctctccctggattcctga

SEQ ID NO: 66 - protein, 316 aa, Medicago truncatula
  UNSURE (236)..(236): Xaa can be any naturally occurring amino acid
MGKASRDKRDIYYRKAKEEGWRARSAFKLLQIDEEFNIFEGVKRVVDLCAAPGSWSQVLSRKLYLPAKLAPDAKDENLPLIVAIDLQPMAPIEGVIQVQGDITNARTAEVVIRHFDGCKANLVVCDGAPDVTGLHDMDEFVQSQLILAGLTIVTHVLKEGGKFIAKIFRGKDTSLLYCQLKLFFPVVTFAKPKSSRNSSIEAFAVCENYSPPEGFNPKDLHRLLEKVGSPSGVDDXDCVSGWLEGPNKVYIPFLACGDLTGYDSDRSYPLPKVAGGTYQSLDPVQPPIAPPYKRALELKKASPQGFRELENLSLDS

SEQ ID NO: 67 - DNA, 1018 bp, Oryza sativa
atgggcaaggcctccaaagacaagagggacatctactaccgcaaggcgaaggaggaggggtggagagctcgtagcgccttcaagcttctgcagatcgaccaggagttcaacatcttccacggagtgaagcgtgttgttgatctgtgcgctgctcccggaagctggagtcaggttttgagtcggaacctgtatgttccagcaaaacaatctcctgattgcaaagaaggtgaccttcctcttattgttgccattgatttgcaaccaatggctccgatagaaggcgttatacaagttcaaggggacatcactaatgctcgaacagcagaagtggttattaggcattttgatggatgcaaagcagatttggttgtctgcgatggtgctcctgatgttaccggccttcatgatatggacgagtttgttcagtcccagcttatactggcggcattgacaattgtgactcacgtacttaaagttggtgggaaatttgttgcgaagattttccgtggaaaagatacaagtctgttgtattgccagctgaaactattcttctcacaagttacctttgcaaagcccaaaagtagccggaactcaagcatcgaggcgtttgcagtttgtgagaattattcgcctcccgaaggatttaaggaaaaagatttatatcacctgctagagaaagtggggactccttctggggctgatgatttagactgcagaagtggatggttagagggaccaaacaaggtctacatcccatttctggcttgcggtgacctcagtggttacgattcggatcgttcttacccactaacaagcacagagggaggatcctaccagagcttggatccagtccagcctccaattgctccaccttacaaaaccgcactggagatgaaaaaggtcgccagccatggcattggagcagatatcagcaaattatccctcgactcctgaactacactctggatcgctgtttgtgttcttgtaactgccaaccctgtggaatttgcaaattgta

SEQ ID NO: 68 - protein, 317 aa, Oryza sativa
MGKASKDKRDIYYRKAKEEGWRARSAFKLLQIDQEFNIFHGVKRVVDLCAAPGSWSQVLSRNLYVPAKQSPDCKEGDLPLIVAIDLQPMAPIEGVIQVQGDITNARTAEVVIRHFDGCKADLVVCDGAPDVTGLHDMDEFVQSQLILAALTIVTHVLKVGGKFVAKIFRGKDTSLLYCQLKLFFSQVTFAKPKSSRNSSIEAFAVCENYSPPEGFKEKDLYHLLEKVGTPSGADDLDCRSGWLEGPNKVYIPFLACGDLSGYDSDRSYPLTSTEGGSYQSLDPVQPPIAPPYKTALEMKKVASHGIGADISKLSLDS

SEQ ID NO: 69 - DNA, 894 bp, Ostreococcus lucimarinus
atggggaagtcgagcaaggataagcgcgatatatactaccgcaaggcgaaagaggagggatggcgcgcgaggtcggcgttcaagttgctgcaaattgacgagtcgttcgatatttttcgagacgtgcgacacgtcgtggatctgtgcgcggcgcccgggtcgtggtcgcaggttttgagtcgaaagttgtacctacccgcgttggcgcgaggggtcgaggaggaagagctgccgaagattgtcgccatcgacttgcaaccgatggcgccgatcgagggcgtgacgacgatacagggcgatatcacgtcgatggacaaagtgcgcgaggtcctgtcgcatttcgatgggaaacacgcggatttgatcgtcggcgatggagcgcccgacgtcacgggtttgcacgatttggatgagtttatgcaggcgcagctcatactcgccggcttgacggtggcgacgcacatattgaaaccaggcggaacgttcatagcgaagatatttcgggggaaagacatcagtttgctctactcacaactgaaaattttcttccccgaagtcacgtgcgccaagccgaaaagtagccggaattctagcatagaagcattcatagtgtgtcagggttactcccctccagagggattcgaaccacatcaattgactcgtattttagaagcgcgtgcgacgtctcacgccgctggagacgagggcgcggccgtgggaaccaagtcctggccgaacaatgtgctcgtgccgtttttggcgtgcggcgatttgtcgggatacgacgccgatcagagctatgcgttggatgacaccaaagtcagactaaaaccggtgcaaccgccgacaacaccggcgtatatgaacgcaatcaagctcttaaagagaaagtga

SEQ ID NO: 70 - protein, 297 aa, Ostreococcus lucimarinus
MGKSSKDKRDIYYRKAKEEGWRARSAFKLLQIDESFDIFRDVRHVVDLCAAPGSWSQVLSRKLYLPALARGVEEEELPKIVAIDLQPMAPIEGVTTIQGDITSMDKVREVLSHFDGKHADLIVGDGAPDVTGLHDLDEFMQAQLILAGLTVATHILKPGGTFIAKIFRGKDISLLYSQLKIFFPEVTCAKPKSSRNSSIEAFIVCQGYSPPEGFEPHQLTRILEARATSHAAGDEGAAVGTKSWPNNVLVPFLACGDLSGYDADQSYALDDTKVRLKPVQPPTTPAYMNAIKLLKRK

SEQ ID NO: 71 - DNA, 951 bp, Populus tremuloides
atggggagagcttcaagggataaaagggatatatactatagaaaagcaaaggaagaaggttggcgtgctcgaagtgcctttaagctcattcagatagatgaggaattcaatatttttgaaggagtgaagcgtgtggtggatttatgtgctgcacctggtagctggagtcaggttttgagccgtaaactatatttaccagcaaaactttcacctgattcaagggataatgatcttcctcttattgtggccattgatttgcaacctatggctctcattgaaggtgttatccaagtccagggtgatattaccaatgcccgaactgctgaagtggtcattagacattttgatggcagcaaggctgacttggttgtgtgtgatggtgcccctgatgttaccggactccatgacatggatgaatttgttcagtctcaactcatactagcgggtttaacaattgtcacacatgtactcaaagaaggtggaaaatttattgcgaagatatttcgtggaaaagatacaagtcttctgtattgccagctcaaattattttttcctgtggtgacttttgccaaaccaaaaagtagccgcaattccagcatagaggcatttgcagtttgtgagaattactctcctcctgagggatttgatccgaaagacttgcgtcgccttttggaaaaggtgggaagcccctctggtgcagatgacctagattgcagtagcgggtggttagaaggggcaagtaaggtgtatattccatttctagcttgcggtgaccttagtgggtatgactctgaccgatcatatccactaccaaaagatgccgatggcacatatcagagcttggatcctgtacaacccccaattgcccctccttataaaagagcccttgaaatgaagaaagcttctagtcatggtgtaaaagagcttgaaaagctctctttggattcttga

SEQ ID NO: 72 - protein, 316 aa, Populus tremuloides
MGRASRDKRDIYYRKAKEEGWRARSAFKLIQIDEEFNIFEGVKRVVDLCAAPGSWSQVLSRKLYLPAKLSPDSRDNDLPLIVAIDLQPMALIEGVIQVQGDITNARTAEVVIRHFDGSKADLVVCDGAPDVTGLHDMDEFVQSQLILAGLTIVTHVLKEGGKFIAKIFRGKDTSLLYCQLKLFFPVVTFAKPKSSRNSSIEAFAVCENYSPPEGFDPKDLRRLLEKVGSPSGADDLDCSSGWLEGASKVYIPFLACGDLSGYDSDRSYPLPKDADGTYQSLDPVQPPIAPPYKRALEMKKASSHGVKELEKLSLDS

SEQ ID NO: 73 - DNA, 954 bp, Saccharum officinarum
atgggcaaggcctccaaggacaagagggacatctattaccggaaggccaaagaggaagggtggagagctcgcagcgccttcaagctcctccagatagaccaggagttcaacatattccatggagtgaagcgtgtggttgacctgtgtgctgctcccggaagctggagccaggttttgagccggaacctgtatgtaccagcaaaacaatctcctgattgcaaggaaggcgaccttcctctcatcgtcgcaattgacttgcaaccaatggccccgatagaaggtgttatacaagtgcagggcgacatcaccaatgctcggacagcggaagtggttattaggcattttgatggatgcaaagcagacttggttgtttgcgatggagctccggatgttactggccttcatgatatggacgaatttgttcagtcccagcttatactcgcggcattgactatcgtgactcatgtactcaaagttggtggaaaatttgtcgcgaagatatttcggggtaaagatacaagtctactgtactgccagctaaaactgttcttctcacaagttacatttgcgaaaccaaaaagtagccggaactcaagcattgaggcgtttgcagtttgtgagaactattcacctccagaaggtttcaaggaggaagatctataccacctgctagagaaagtggggactccttcaggaggtgacgatttagattgcagaagcggatggctcgagggaccaaacaaggtgtacatcccgttccttgcctgcggggatctcagcggctacgactctgatcgctcataccggctcccgagcacggaaggtgggtcctaccggagcttggaccccgtccagcctcccatcgccccgccttacaaaaccgctctgcagatgaagaaggtttccagccacagcgccagcgcggacgccatgaaaccatccacagattcttga

SEQ ID NO: 74 - protein, 317 aa, Saccharum officinarum
MGKASKDKRDIYYRKAKEEGWRARSAFKLLQIDQEFNIFHGVKRVVDLCAAPGSWSQVLSRNLYVPAKQSPDCKEGDLPLIVAIDLQPMAPIEGVIQVQGDITNARTAEVVIRHFDGCKADLVVCDGAPDVTGLHDMDEFVQSQLILAALTIVTHVLKVGGKFVAKIFRGKDTSLLYCQLKLFFSQVTFAKPKSSRNSSIEAFAVCENYSPPEGFKEEDLYHLLEKVGTPSGGDDLDCRSGWLEGPNKVYIPFLACGDLSGYDSDRSYRLPSTEGGSYRSLDPVQPPIAPPYKTALQMKKVSSHSASADAMKPSTDS

SEQ ID NO: 75 - DNA, 945 bp, Triticum aestivum
  misc_feature (637)..(637): n is a, c, g, or t
  misc_feature (673)..(673): n is a, c, g, or t
  misc_feature (775)..(775): n is a, c, g, or t
  misc_feature (829)..(829): n is a, c, g, or t
  misc_feature (837)..(837): n is a, c, g, or t
atgggcaaggcttcgaaagacaagcgggacatctactaccggaaggccaaggaggaggggtggagggctcgcagcgccttcaagctcatgcagatcgaccaggagttcaacatcttccacggagtgaagcgtgccgttgacctgtgcgccgctcctgggagctggagccaggttttgagccgcaatttgtatttaccggcgaagctatcatctgacggcaaagatggtggccttcctctcatcgtcgcaatcgatctgcaacctatggctccgatagaaggtgtcatacaagtgcagggcgacatcaccaatgctcgaacagcggaagtggttatcaggcactttgatggatgcaaagcggacttggttgtctgtgatggtgcccctgatgttactggacttcatgatatggacgagtttgttcagtcccagcttatattggcggcactgacaattgtgactcatgtacttaaagttggtggaaaatttgttgcgaagattttccggggtaaagatacaagtctcctgtattgccagttaaagctgttcttctcacaagttacatttgcaaagccaaaaagcagccgcaactcaagtatcgaggcatttgcagtttgcgagaactactcacctccangagggcttcaagagaaagatttatatcacctgttgnagaaagtgggaactccttctggggctgatgatttagattgcagaagcggatggttggaggggaccaaacaggtctacatcccgtttctggcttgtggcgacntcaggggttacgatcggaccgttcatacccccctccgagcacagaggcggcaantaccaganctagatccagtcagccctccattgcccggccgtaaaaactgcgttgaaattagaaagggtctaaccagggtctggcgcaatacagcaattatcttcgaccttaaataa

SEQ ID NO: 76 - protein, 314 aa, Triticum aestivum
  UNSURE (213)..(213): Xaa can be any naturally occurring amino acid
  UNSURE (225)..(225): Xaa can be any naturally occurring amino acid
  UNSURE (259)..(259): Xaa can be any naturally occurring amino acid
  UNSURE (277)..(277): Xaa can be any naturally occurring amino acid
  UNSURE (279)..(279): Xaa can be any naturally occurring amino acid
MGKASKDKRDIYYRKAKEEGWRARSAFKLMQIDQEFNIFHGVKRAVDLCAAPGSWSQVLSRNLYLPAKLSSDGKDGGLPLIVAIDLQPMAPIEGVIQVQGDITNARTAEVVIRHFDGCKADLVVCDGAPDVTGLHDMDEFVQSQLILAALTIVTHVLKVGGKFVAKIFRGKDTSLLYCQLKLFFSQVTFAKPKSSRNSSIEAFAVCENYSPPXGLQEKDLYHLLXKVGTPSGADDLDCRSGWLEGTKQVYIPFLACGDXRGYDRTVHTPLRAQRRQXPXLDPVSPPLPGRKNCVEIRKGLTRVWRNTAIIFDLK

SEQ ID NO: 77 - DNA, 1246 bp, Apis mellifera
taaagctaaccaaaacgtataacaacaataaacaacaagcattgtacattagtcaataatgggaaaaacatcaaaagataaacgagatatatattatcgacgagcaaaagaagaaggatggagagcaaggagtgcttttaaattgcttcaaatagataacgaatgtcatattttagatggagtaaacaaagctgtggatttgtgcgctgcacccgggagctggagtcaagttttatcacgaagattaaatgagaattataaaaaagctttggaaacaggaaatgcaatacctccaaaaatagttgcagttgatttacaagctatggcaccattggaaggagtgattcaaattcaaggagacattacgaatattgatactgcaaaacaaattatctctcattttgataatgaacaagctgatttagtagtttgcgatggagcacctgatgtgacaggtttacatgatatggatatttatatccaatctcagttattattagcagctctgaatattactactcatatattaaagcaaggaggcacatttgttgcaaaaatatttagagctaaagatgtgactttgctctatgctcaactaaaaatatttttcccctatgtctattgtacgaaacctagcagttctcgtaactctagtattgaagcatttgtagtttgtaaagattactcaccaccagaaggttataaacctcatatgatgaatcctcttttaacacataaaccatgtgattttaatgaccttacaggaattaatagagttattgttccatttgttgtttgtggtgatcttagtcagcctgattccgatacgtgttatccattggattttgaaggaaaaacatatacttatcacgaaccggtccaaacaccgatttcaccaccttacaaagaagcactcagtttgatggaagatagagataccgatttcagaagattcgatgttaatgtagttgtagataatttaagttcattgactattgaggactttaaaaaacaagcgaagcaaaaacataaagagataaatgaaactaaaaggatcgaattgcaagataataaaaaagatgatagcgaggaagatatattgggacttgacaagttaatgcccaccgaattatttgatgaatctgaaaataaaaataatgataatatgtaaaaatgttatgattttatattatacatataatttgagttataaatgtttttaatatattaataataacttataaat

SEQ ID NO: 78 - protein, 370 aa, Apis mellifera
MGKTSKDKRDIYYRRAKEEGWRARSAFKLLQIDNECHILDGVNKAVDLCAAPGSWSQVLSRRLNENYKKALETGNAIPPKIVAVDLQAMAPLEGVIQIQGDITNIDTAKQIISHFDNEQADLVVCDGAPDVTGLHDMDIYIQSQLLLAALNITTHILKQGGTFVAKIFRAKDVTLLYAQLKIFFPYVYCTKPSSSRNSSIEAFVVCKDYSPPEGYKPHMMNPLLTHKPCDFNDLTGINRVIVPFVVCGDLSQPDSDTCYPLDFEGKTYTYHEPVQTPISPPYKEALSLMEDRDTDFRRFDVNVVVDNLSSLTIEDFKKQAKQKHKEINETKRIELQDNKKDDSEEDILGLDKLMPTELFDESENKNNDNM

SEQ ID NO: 79 - DNA, 1093 bp, Caenorhabditis elegans
atgggaaaaacatctcgtgacaaaagggacatttactatcgtctggcaaaggagaacaaatggcgagcacggagtgcattcaaattgatgcagattgatgatgaatttcagattctgaaaggagtccgtcgagctgtagatttgtgtgcagcacctggaagttggtcacaagtgctatcgaaaaggttatacgaggaagatcaagaggcaaaaattgttgcgattgatcttcagccgatggcaccgattccaggagttattcaacttcaaggagatattacttccgttgatacagctaatcaggtcatcaaacacttttccggagaaaaatcagatattgtgatttgcgacggagccccagatgtaaccggaattcattctctggacgaattcatgcaagccgaactaatcctcgctgccttcaacatcacaagtcacgttctcaaagaaggcggcaactttctcgcgaaaattttccgatcccgaaactcctctcttctctatgcacaaatgaagaagtattttaaaaaagtatatctagccaaaccacgaagttcccgtcaatccagttgtgaagcttttgtcctgtgtctcgactattcaccgcccgagggatttgttccaacaatgggaaagacttcattagacgcaactgatgcttctgctatttcacctgatattatcgatggattcgtgacttgtggcgatctaagtggatgggacagcgagaagtcttatccgttggatattgatgcttgttttcccaaaggagagattgatgaagagcagaaaaaacgatacgagttcaaagacgtcgttcagccaccaacagatcctgcctacaaagcagctctcgataagaagaaaagtggagtttttgcaaaaatgtctgcagatttgaacagacagctgaaagctgaacttagtcgtggaaaggatcagaagaagactccagcagagaatgttccaagcgtagaagaattggagaaagctgctgaaaaatttcaactataatttggttatttttgttctcattgtcagttaattgattttttttcacttttttcgagtctcattattagtatttgttttg

SEQ ID NO: 80 - protein, 337 aa, Caenorhabditis elegans
MGKTSRDKRDIYYRLAKENKWRARSAFKLMQIDDEFQILKGVRRAVDLCAAPGSWSQVLSKRLYEEDQEAKIVAIDLQPMAPIPGVIQLQGDITSVDTANQVIKHFSGEKSDIVICDGAPDVTGIHSLDEFMQAELILAAFNITSHVLKEGGNFLAKIFRSRNSSLLYAQMKKYFKKVYLAKPRSSRQSSCEAFVLCLDYSPPEGFVPTMGKTSLDATDASAISPDIIDGFVTCGDLSGWDSEKSYPLDIDACFPKGEIDEEQKKRYEFKDVVQPPTDPAYKAALDKKKSGVFAKMSADLNRQLKAELSRGKDQKKTPAENVPSVEELEKAAEKFQL

SEQ ID NO: 81 - DNA, 1433 bp, Danio rerio
gaagaagaagaactgtcacgttgcggcgaaaacaagcagcagtccaacaataagtgagtgaaggtgaaatggggcgctcatccaaagacaaacgagatatttactacagacttgcgaaggaggaaggatggagggcgagaagtgccttcaaactcctgcagctggatgaggagttcaagctgtttagaggtgttagtcgtgctgtggatctgtgtgcagcacctggcagctggagtcaagtcctcagccgcaaactacgtggaaaagacaagagtgaagaggtcaagattgtggcagttgatctgcaagccatggcacctttaccgggcgtcacacaaattcaaggagacatcaccaagatttctacagcagaggaaattattcgacattttgaaggagagtctgcagacttggttgtgtgtgacggtgctcctgatgtgacagggcttcatgatgtagatgagtatattcaggcacagctcctgttggcagctctcaatatcaccacacatgttctcaaaccaggcggcaactttgttgcaaaaattttcaggggaaaagatgtgaccctgctgtactcgcagctaaagatcttcttcagctttgtgacctgtgccaaaccacccagcagccgcaactctagcattgaggcatttgtggtgtgtcagaattactctccacctgagggttacgttcccaacatgtccaaccctttactggatcactcctatgatgtcgactttaaccagttagagggaccaaaccgaataatagtccctttccttgcttgtggagatctcagtgggtttgattcagacagaacgtatcctcttcagcttgattctagcaaagagtatcagtatttaccaccaacccaacctccaattcggcctccctaccagcaagcctgtcaattgcgcaagagtaacctgcttgccaaagaggactcgccgtccggtgcgctggatgaagccttgaccgctttagatctcaacacaaaaccagacacaagcacgactacaccaggagcctcagaataatggaattgtacagcttcaagttttgcttgacactgtcaagaatgtgtttgtcacgggaacatctttgtactttatttacacctacattttgatagtattaacaaacccacagaaatttttactcctagaagatatttatttagaggtaaataaggtacaaaggtttctatgattctgtctctgtgtaaagcttttatttaatttttcatgcatttctggattgtaattaatgtaacttttaggcattttattctttctgactgtattacatttaccattcacaggattgtttcagtaagtcgccgaaacaacctgatgacttttaacctcagctttacatggtaataaaacactcaaatctaaaaaaaaaaaaaaaaaaaaaaaaaaaaaaaa

SEQ ID NO: 82 - protein, 323 aa, Danio rerio
MGRSSKDKRDIYYRLAKEEGWRARSAFKLLQLDEEFKLFRGVSRAVDLCAAPGSWSQVLSRKLRGKDKSEEVKIVAVDLQAMAPLPGVTQIQGDITKISTAEEIIRHFEGESADLVVCDGAPDVTGLHDVDEYIQAQLLLAALNITTHVLKPGGNFVAKIFRGKDVTLLYSQLKIFFSFVTCAKPPSSRNSSIEAFVVCQNYSPPEGYVPNMSNPLLDHSYDVDFNQLEGPNRIIVPFLACGDLSGFDSDRTYPLQLDSSKEYQYLPPTQPPIRPPYQQACQLRKSNLLAKEDSPSGALDEALTALDLNTKPDTSTTTPGASE

SEQ ID NO: 83 - DNA, 1984 bp, Homo sapiens
ggatacgtcgacaatagatgacggggctcacgttgtacgttcacatcaggtcccggcccgccggaacctgggcgatccacgatgccgagtttgccacgctgcgacagcccataggcttgcccccccgggcattcgggtggactacgaacacaaactgaagccctaggacttgtcgcccgtttgcgctctcgccgaggcacaggctgctcgcggaccaccctgctccgaaaactaagaaggggaccagtagacggggtggattcgaggtggggacatgggacgcagcggtcggagccgcctggaggggtacccggtggtcccgatggagctatcatctttgagaggtaggtggtagcccattcatctggttactgatactggccggcatcagtggactgtcggcaggtccttgagcaactggtgtgtgaaatgggacggacgtcaaaggacaagcgggatgtctactaccgcctggccaaggagaatggctggcgtgctcgcagcgccttcaaactgctacaactggataaggaattccaactcttccaaggcgtgacacgggcagttgacctgtgtgcagccccaggcagctggagccaggtgctgagccggaagatcgggggccaagggtccggccacgtggtggctgtggacctgcaggctatggctccactaccaggtgtggtacagatccagggggacatcacccagctgtccactgccaaggagatcatccagcactttaagggctgccctgcggacctagtggtgtgtgacggggctcctgatgtaaccggtctccatgatgttgatgagtatatgcaggcccagctcctcctagctgctctgaacattgctacacatgtcctgaagccagggggctgctttgtggccaagatattccgaggccgggatgtgacgctcctctacagccagctgcaggtcttcttctccagcgtgctgtgtgccaagcccaggagcagccggaactctagcatcgaggccttcgctgtctgtcagggctatgaccctcccgagggcttcatcccggacctgagcaaacccctgctggaccattcttacgatttcaaccagctggatggtcccacccgcatcattgtgccttttgtgacctgtggggacctgagctcctatgattcggaccgcagttacccactggacctagagggcggctcagagtacaagtacactccacccacacagccccccatctcgccaccataccaggaggcctgcacgttgaagaggaaggggcagctggccaaggagatccgcccccaggactgccccatcagcagagtggacacgtttccccagcccctggccgcccctcagtgccacaccctgctggcccctgagatggaagacaatgaaatgagttgttcaccttaacccattacgctggcaaactgatacaactcagaaactgctcaatgtcaggaaaaccggaacttgttgatgaacttgttttcaaaatatcatctcatcaacgaggcctggacaaacaagccctgaggagggatctgcaacaaccctgaagacaacaaggaaagaaaccatgaaagtctgtctgtactgcagtgggaattcttgagtgaggtcttacctcttctttaaacctcttcaggagtgtcctgattatgtccagaattttccctaaaggcagggattcttaacctggatagaagccaggggtaaccatgaacttgatggaagaaaatgttacatctttattttcagcaatgaaactgaaatttagccttactcccaagttataaatgctggcaacaaatcacagtagtaaaagcagtacctgggattttcccaccaatacaaaccagttacagcaactgtaatgtaacataaaaagggcatcttgaagtattgttcatatttgtcacctcttggaatgatagcagatcctgtaagttgatgtattaattaaaagcccatatattactgc

SEQ ID NO: 84 - protein, 327 aa, Homo sapiens [sequence omitted]

SEQ ID NO: 85 - DNA, 2466 bp, Arabidopsis thaliana
atgggtaaggtcaaaggaaagcatcgtttggataagtactatcgtctcgctaaggaacgtggattccgttctcgagcttcctacaagcttcttcagctcgacgccaagtactctcttctccactcagctcatgccgttctcgatctctgcgccgcccctggtggttggatgcaagtcgccgtcgagaaagttcccgtcggcagcctcgttctcggtatcgatcttgtcccgattctccctgttcgtggctgtgttactatgacgcaagatatcacaaggactgagtgtaaatcgaagatcaagcaagtgatggagcagcatggtgttagtgcttttaatttggttctgcacgatgggtctccaaatgttggtggtgcgtgggcacaagaggctatgagccagaacgctttggttattgattctgttagattagccactgagttcttagctcgcaacgggaatttagtcaccaaggttttcaggtctcgagactacaactctgtgctctactgtcttgggaggctgtttgaaaaagttgaagtgtttaagccgccggctagtcgttcagcatctgcagaaacatatcttgtgggtttgaaatacttagcccctgccaagattgatccccgtcttcttgattatagacatctctttaaggagtcagcagaacccacgagaaaggtggtggatgtgcttggaggatcaaaacaaaagagaaaccgtgatgggtatgaagatggggagtccattttgagaagagttgcatctgctgctgatttcatttggtctgaaaatcctcttgacgttcttggcacgactacttccatatcatttgatgatcaagcctctctacctttaaaggaacatgatttgacgacagaggagattaaaattctatgcgatgatcttcctgtcttggggaagaatgacttcaagcatatcctaaaatggcgaatgcaaatcaggaaagctctgactcctgagaaaaaggaagttgctaaacctgagcctgatgtgggaaaggaagatgaggaaaatgaagatgataaactactcaatgaattggaagagctgacaaacacagttgaccgcaagaagaaacaggcaaagaagattcttgcaaaacgaagggctaaggacaaggcgcggaaggcgactggtccacagatggatgtacttgaagatggtttcgtcgacaatgaattgttctctcttaatgctatcaagggaaagaaagatctaatggcagttgacaatgatgaagatgataatggcaatgccgttgacagtgagaacgaagaccatggcgaaggagcttcagatgactccaaagacagtgacagagattctgatgaagaacgtcagaaatacactgaacaaatggaagagatttttgagcaggcatatgagcggtatatggtgaagaaagaaggaagcgcaaagcaaaggaagcgggctaggcaggcccatgctgaaaagctggaggaaggtgatggagatgaagaaatgaagatcgattacgattcagatatgaatgaagaaaaggatgaggcaaaccctcttgttgtaccacttgatgatggagtggtccaaacaaaggaggaaatatccaaccagtggttcagtcagaatatatttgcagaagccgtggaagaaggagacttgggaaaagatgacagtgaagacgaaatagcaaataagaaaaagagcaaaaatctgtctaaaccagacaagtcaaagcagaaggcttcaaaagcaagtgtgttgtctgatcagagcttgcccaatagctccaagaaggaagatgagtttgaggtagtccctgcaccagccacagattctgactcagattcatcctctgaagatgatgttcataccaaggccgagatactggcatgtgccaaaaaaatgctgaggaagaagcagagagaacagatgcttgatgatgcatataacaaacacatgtttgtagatgaaggtttaccaaaatggtttgtggatgacgagaagcagcacagacaaccaatgaaacctgttacgaaagatgaagttaatgcaatgaaagcacagttcaaagagatcaatgctcgtccagccaagaaggtggcagaggccaaggcacggaagaagcgagctgcccagaaaagattggagaaagtgaggaagaaggcaaacacaatatctgacacagcagatatatcagaccgttcaaaggacaagatgatagacaagctatacaagaaagcagcagagccaagaaagccaaggaaagaactggttgtgtctaagaaaggagttggggttaaagttggtaagggacagaagagagtggataggaggatgaagagtgatgataggaaacgtgggggaggaaagcccggtaggaacgggcagaagggcactggtaaagcaggccagaaaggaaaaaggcctgctgggaaacctcggggaaggaaacccgggtaa

SEQ ID NO: 86 - protein, 821 aa, Arabidopsis thaliana
MGKVKGKHRLDKYYRLAKERGFRSRASYKLLQLDAKYSLLHSAHAVLDLCAAPGGWMQVAVEKVPVGSLVLGIDLVPILPVRGCVTMTQDITRTECKSKIKQVMEQHGVSAFNLVLHDGSPNVGGAWAQEAMSQNALVIDSVRLATEFLARNGNLVTKVFRSRDYNSVLYCLGRLFEKVEVFKPPASRSASAETYLVGLKYLAPAKIDPRLLDYRHLFKESAEPTRKVVDVLGGSKQKRNRDGYEDGESILRRVASAADFIWSENPLDVLGTTTSISFDDQASLPLKEHDLTTEEIKILCDDLPVLGKNDFKHILKWRMQIRKALTPEKKEVAKPEPDVGKEDEENEDDKLLNELEELTNTVDRKKKQAKKILAKRRAKDKARKATGPQMDVLEDGFVDNELFSLNAIKGKKDLMAVDNDEDDNGNAVDSENEDHGEGASDDSKDSDRDSDEERQKYTEQMEEIFEQAYERYMVKKEGSAKQRKRARQAHAEKLEEGDGDEEMKIDYDSDMNEEKDEANPLVVPLDDGVVQTKEEISNQWFSQNIFAEAVEEGDLGKDDSEDEIANKKKSKNLSKPDKSKQKASKASVLSDQSLPNSSKKEDEFEVVPAPATDSDSDSSSEDDVHTKAEILACAKKMLRKKQREQMLDDAYNKHMFVDEGLPKWFVDDEKQHRQPMKPVTKDEVNAMKAQFKEINARPAKKVAEAKARKKRAAQKRLEKVRKKANTISDTADISDRSKDKMIDKLYKKAAEPRKPRKELVVSKKGVGVKVGKGQKRVDRRMKSDDRKRGGGKPGRNGQKGTGKAGQKGKRPAGKPRGRKPG

SEQ ID NO: 87 - DNA, 675 bp, Arabidopsis thaliana
atgagtggggcaggtgtaccggactttttctacagagaagctcaacgtcttggctatgttgctcgctcagctttcaagcttctacagattcaaaaacagtacaagctcatcaaaccaggctcctctgttcttgacctaggttgcgcgcctggtgcttggcttcaggttgcttgccaaagcttaggcccacttagaagtggtggaattgtcgttggtatggatataaagaaggtgaaggttcctccacagtgtgattctcgagtgcaaaccattgctgctgatgttttaaactttcccagacaaaagattcgggagttatcacctcagcaattgggattttcagtcattctttcagatatgtgtcactcagtatctggaataaccactagagatgcagctctgtctgctgaattgggaatgcgagcacttgatttggctgttggtcaagctgccatctctcagtcacctaatgatgatgatggaggcccaaacgaaagtcgtcctggtgtacttaggcatggtggccatcttgtgatcaagcttctagaaagcgaggatgctcaagattttgctcgaatttgcaagcctatcttcaacaaggcatcttggttgaggccaaaagctacaagaccatcatctcgagaaatttacttgatttgccagggatttcgataa

SEQ ID NO: 88 - protein, 224 aa, Arabidopsis thaliana
MSGAGVPDFFYREAQRLGYVARSAFKLLQIQKQYKLIKPGSSVLDLGCAPGAWLQVACQSLGPLRSGGIVVGMDIKKVKVPPQCDSRVQTIAADVLNFPRQKIRELSPQQLGFSVILSDMCHSVSGITTRDAALSAELGMRALDLAVGQAAISQSPNDDDGGPNESRPGVLRHGGHLVIKLLESEDAQDFARICKPIFNKASWLRPKATRPSSREIYLICQGFR

SEQ ID NO: 89 - DNA, 1212 bp, Oryza sativa
atgagcggcgcgggcggcaccgccgacttcttctaccgcgaggcgcagcgcctcggctacgtcgcccgctccgcgttcaagctgatccagatacagaagcagcacaagctcatcgcccccggcgccgccgtcctcgacctcggctgcgcccccggcgcgtggctccaggtggcgtgccagaacctgggtccgctcgagaagggcggggtgatcgtcggcgtcgatgtcaagaaggtgaaggttccatctgcgcactgtgactcgagggtcaggaccgtttgcgccgatgtgatggctctgatgaagcagcaagctcgggcaatgtcgccacaggaacgaggattctctgtaatattgtcagacatgtgcccagtagtttctggaattacaaccaaagatgcggctatatcttgcgagctgggcatgcgtgctctttcattggcagttggtaagatgaaagcaaaagattcagattgcattgcaattttagagaagtttcagagctccactgagccagatcctgatgaagatggcattctccgtcgtggaggcagccttgtaattaagtttcttgagaatgaggatataccaggttttggcaaattttgcaaagagaagttcaagaaagtgtccttattgagacccaaggcgacaagatctagttcgagggagattttcatggtctgtgaaggccgcggcttctcggtcgcgccacgctggcatccactttctcatggcccggcgacgtacgggacgggctccacgtgtcacgccgccgcccacagcttggtcgaattgagaactgttgggcttcaaagagaggctcccaagtgcagtgacctgaaagctcaagctcaacctgcggcgttcgtgcggattccgcggggcgcgtcccttcccgccacccgcaacgccgctggactccactccactctcctcgtcgcttcgttgctgcacatcaccacccaccgcggtggcactcacttctatattagcttaagcgtggggtgggagacgccgaggagggaggagtgccgcatcccggtggtgccgccgcagtgcccggcgccgccgaggaagaggccggtggcgctgccggagctggggaaggagcggcgggagccgcccaagggcgggtacttccagccgccggacctcgagtcgctcttcgtgctcgcgccgccgcggaggcaggcgtccagctgcgcgtag

SEQ ID NO: 90 - protein, 403 aa, Oryza sativa
MSGAGGTADFFYREAQRLGYVARSAFKLIQIQKQHKLIAPGAAVLDLGCAPGAWLQVACQNLGPLEKGGVIVGVDVKKVKVPSAHCDSRVRTVCADVMALMKQQARAMSPQERGFSVILSDMCPVVSGITTKDAAISCELGMRALSLAVGKMKAKDSDCIAILEKFQSSTEPDPDEDGILRRGGSLVIKFLENEDIPGFGKFCKEKFKKVSLLRPKATRSSSREIFMVCEGRGFSVAPRWHPLSHGPATYGTGSTCHAAAHSLVELRTVGLQREAPKCSDLKAQAQPAAFVRIPRGASLPATRNAAGLHSTLLVASLLHITTHRGGTHFYISLSVGWETPRREECRIPVVPPQCPAPPRKRPVALPELGKERREPPKGGYFQPPDLESLFVLAPPRRQASSCA

SEQ ID NO: 91 - DNA, 1187 bp, Oryza sativa
ggtcagccaatacattgatccgttgccaatcatgcaaagtattttggctgtggccgagtgccggaattgataattgtgttctgactaaattaaatgaccagaagtcgctatcttccaatgtatccgaaacctggattaaacaatcctgttctgttctctagcccctcctgcatggccggattgtttttttgacatgttttcttgactgaggcctgtttgttctaaactttttcttcaaacttttaactttttcatcacatcagaacttttctacacacataaacttttaacttttctgtcacatcgttccaatttcaatcaaacttttaattttggcttgaactaaacacaccctgagtcttttattgctcctccatacgggttggctggttgagaataggtattttcagagagaaaatctggatattgggaggaggaacttggcatgaatggccactatatttagagcaattctacggtctttgaggaggtaccatgaggtaccaaaattttagtgtaaattttagtatcttcttaaggaccgtaaaattgctcctatatttaagggatgtttatatctatccatatccataatttgattttgataagaaaaaatgtgagcacaccaagcatgtccatgaccttgcactcttggctcactcgtcaactgtgaagaacctaaaaaatgctcaatatagctacaggtgcctgaaaaaataactttaaagttttgaacatcgatttcactaaacaacaattattatctccctctgaaatgttgctacctaagatgatagtttagaactctagaatcattgtcggcggagaaagtaaattattttccccaaatttccagctatgaaaaaaccctcaccaaacaccatcaaacaagagttcaccaaaccgcccatgcggccatgctgtcacgcaacgcaccgcattgcctgatggccgctcgatgcatgcatgcttccccgtgcacatatccgacagacgcgccgtgtcagcgagctcctcgaccgacctgtgtagcccatgcaagcatccacccccgccacgtacaccccctcctcctccctacgtgtcaccgctctctccacctatatatgcccacctggcccctctcctcccatctccacttcacccgatcgcttcttcttcttcttcgttgcattcatcttgctagc

SEQ ID NO: 92 - DNA, 951 bp, Hordeum vulgare
atgggcaaggcctccaaagacaagcgggacatatactatcggaaggccaaggaggaggggtggagggctcgcagcgccttcaagctaatgcagatcgaccaggagttcaacatcttccacggagtgaagcgcgccgttgacctgtgcgctgcccctgggagctggagccaggttttgagccgcaatttgtacctgccggcaaagctatcatctgacggcaaagatggcggccttcctctcatcgtcgcaatcgatctgcagccgatggctcctatagaaggtgtcatacaagtgcagggcgacatcaccaatgctcgaacagcggaagtggttatcaggcacttcgatggatgcaaagcggacttggttgtctgtgatggtgcccctgatgttactgggcttcatgatatggatgagtttgttcagtcccagcttatattggcggcactgacaattgtgactcatgtactcaaagttggtggaaaatttgttgcgaagattttccggggtaaagatacaagtctcctgtattgccagttaaagttgttcttctcacaagttacatttgcaaagccaaaaagcagccgtaactcaagtatcgaggcatttgcagtttgcgagaactactcacctccagagggcttcaaagagaaagacttgtatcacctgctggagaaagtgggaactccttctggggctgatgatttagattgccgaagcggatggttggagggaccaaacaaggtctacattccgtttctggcttgcggtgacctcagcggttatgattcggaccgttcataccccctcccgagcacagaaggtggcacctaccagagcctagatccagtccagcctcccatcgcgccgccatacaaaactgcgttggagatgaagaaggcgtctagccacggcgccggcgcagatactagcaaatcatatgtcgacccc

SEQ ID NO: 93 - protein, 317 aa, Hordeum vulgare
MGKASKDKRDIYYRKAKEEGWRARSAFKLMQIDQEFNIFHGVKRAVDLCAAPGSWSQVLSRNLYLPAKLSSDGKDGGLPLIVAIDLQPMAPIEGVIQVQGDITNARTAEVVIRHFDGCKADLVVCDGAPDVTGLHDMDEFVQSQLILAALTIVTHVLKVGGKFVAKIFRGKDTSLLYCQLKLFFSQVTFAKPKSSRNSSIEAFAVCENYSPPEGFKEKDLYHLLEKVGTPSGADDLDCRSGWLEGPNKVYIPFLACGDLSGYDSDRSYPLPSTEGGTYQSLDPVQPPIAPPYKTALEMKKASSHGAGADTSKSYVDP

SEQ ID NO: 94 - DNA, 1414 bp, Sorghum bicolor
gcacgagggcccagtgggctcaaaacacttggcggcgccacctcgccctcctccgactactcgctcgctcgtcccgccccgtcttccgcccccgcctccgcccccgccgcccttggctcgcaccagcgccacctcgccctcctccgactactcgctcgctcgtcccgccccgtcttccgcctccgcctccgccgccgccgcccttggttcgcctcatcgtcgtcgccatgggcaaggcctccaaggacaagagagacatctactaccggaaggccaaagaggagggatggagagctcgcagcgccttcaagctcctccaaatagaccaggagttcaacatcttccatggagtgaagcgcgtggttgatctgtgtgctgctcccggaagctggagccaggttttgagccggaacttgtatgtaccagcaaaacagtctcctgattgcaaggaaggtgaccttcctctcatcgttgcaattgacttgcaaccaatggccccgatagaaggtgttatacaagtgcagggtgacatcaccaatgctcggacagcggaagtggttattaggcattttgatggatgcaaagcagacttggttgtttgcgatggagctccggatgttactggccttcatgatatggacgaatttgttcagtcccagcttatacttgcggcattgactatcgtgactcatgtactcaaagttggtggaaaatttgtcgcaaagatatttcggggtaaagatacaagtctcctgtactgccagctaaaactgttcttctcacaagttacatttgcgaagccaaaaagtagccggaactcaagcattgaggcatttgcagtttgtgagaactattcacctccagaagggttcaaggaggaagatctataccacctgctagagaaagtagggactccttcaggagttgacgatttagattgcagaagcggatggctcgagggaccaaacaaggtgtatatcccgttccttgcctgtggggatctcagtggctacgactccgaccgctcatacccgctcccaatcacagacggtggctcctaccggagcttggaccccgtccagcctcccatcgccccgccttacaaaaccgcccttcagatgaagaaggcctccagccacagcgccagcagggacgccatgaaaccatccacagactcttgagctgcaacctgggccagcctgaacccccaggcgatgatgtttgtcccacactggtagcatcgctgggtcctggacctggctctctcctgagcctcgtctattaaaaaggaaaaagaaaatttgggaacattttgtgtcgaggtgggacattttgtggtagttttgagctgtggctccgcagcatgtacctgatcactactgattacgcagagatcctgcttgtgtccttgtgc

SEQ ID NO: 95 - protein, 317 aa, Sorghum bicolor
MGKASKDKRDIYYRKAKEEGWRARSAFKLLQIDQEFNIFHGVKRVVDLCAAPGSWSQVLSRNLYVPAKQSPDCKEGDLPLIVAIDLQPMAPIEGVIQVQGDITNARTAEVVIRHFDGCKADLVVCDGAPDVTGLHDMDEFVQSQLILAALTIVTHVLKVGGKFVAKIFRGKDTSLLYCQLKLFFSQVTFAKPKSSRNSSIEAFAVCENYSPPEGFKEEDLYHLLEKVGTPSGVDDLDCRSGWLEGPNKVYIPFLACGDLSGYDSDRSYPLPITDGGSYRSLDPVQPPIAPPYKTALQMKKASSHSASRDAMKPSTDS

SEQ ID NO: 96 - DNA, 1008 bp, Brassica napus
atgggaaaagcttctcgggataaaagggatatatactatcggaaagccaaagaagaagggtggcgtgcaagaagtgcctttaagcttcttcagattgatgaggagttcaacatttttcaaggagtgaagagggttgtagatttatgtgctgcacctggtagctggagtcaggttctgagtcgtcaactgtatcttcctgcaaagtattcagctgagtcaaaagaagaagatcttcctcttattgtggccatagatttgcagcctatggctccaatcgaaggtgtaatccaagttcaaggggacataactaatgctcggactgccgaagtggtcattagacattttgacggttgcaaggctgacctggttgtgtgtgatggtgctccagatgttaccggtttgcatgacatggatgaatttgtccagtcccaactcatactagcgggcttaacgattgtaacccatattcttaaagaaggtggaaaattcattgcaaagatattccgtggaaaagatacaagtctcttgtactgtcagctgaagttgtttttcccaactgtgacttttgcgaaacctaaaagcagccgcaattctagtatagaagcttttgctgtctgcgaaaattactccccaccagaaggatttaacccgagagatctgcatcttctcttggagaaagtcggaagcccttcaggtggaagcgatctcgattgcagtagtggttggctcgagggacccaacaaagtttatattccattcttggcatgtggtgacttaagcggttatgactcggaccggtcttacccactcccaaaagaggcagatggatcgtcataccgaagcctggacccgattcagcctccgatcgcaccgccttataaacgagctattgagctcaagaaagcttcagcacaaagcctcaactcttaaagctaggctcgataacaataataatgctaaacaaagacacagaaagaagtttttcattcgattcttagaaggctgtag

SEQ ID NO: 97 - protein, 309 aa, Brassica napus
MGKASRDKRDIYYRKAKEEGWRARSAFKLLQIDEEFNIFQGVKRVVDLCAAPGSWSQVLSRQLYLPAKYSAESKEEDLPLIVAIDLQPMAPIEGVIQVQGDITNARTAEVVIRHFDGCKADLVVCDGAPDVTGLHDMDEFVQSQLILAGLTIVTHILKEGGKFIAKIFRGKDTSLLYCQLKLFFPTVTFAKPKSSRNSSIEAFAVCENYSPPEGFNPRDLHLLLEKVGSPSGGSDLDCSSGWLEGPNKVYIPFLACGDLSGYDSDRSYPLPKEADGSSYRSLDPIQPPIAPPYKRAIELKKASAQSLNS

SEQ ID NO: 98 - DNA, 1446 bp, Glycine max
gagaagcaaacaaaccctagcgcagagaagagatattcttcttcgcagaatcattgcagttgcgagcaggccgaagaaacctaacctgcattcgaaaatcagcccccttggaaatcccaacactagtgtggtacctgtgctcgacgattgggtgttcaaggggaattagcttcgtctcgcagaacttcaacgcatcattcgtgaccttcgcaaacgcggggtttgttcttatttggttttgccagttgttgccatcaggggtttgtttctgaaatttgtggcagggcaagtgagcgataaaccatggggagagcttcaagggataagagggatatctattaccggaaagcaaaagaagaaggttggcgagctcgaagtgcgtttaaactccttcagatagacgaggaattcaacctttttgatggagtgaagcgtgttgtagatttatgtgctgccccaggtagctggagtcaggttttgagtcgtaaattgtatctcccagccaagcttgcacctgatgcaaaggatgaaaatcttcctcttattgtagctattgatttgcaaccaatggctccaattgaaggtgtcatccaggtgcagggtgatataactaacgctcggacagctgaagtggtcattagacattttgatggttgcaaggctgacctagttgtgtgtgatggtgcgcctgatgttactggccttcatgacatggatgaatttgtacaatcccaactcttacttgcagggttgacaattgttactcatgtacttaaggaaggagggaagtttattgcaaagatatttagaggaaaggacacaagccttctatattgtcagctaaaattatttttccctgtagtgacgttcgcaaaaccaaaaagcagccgtaattccagcatagaggcatttgcagtttgtgaaaactattcccctcctgaaggattcaatccaaaagatcttcatcgccttcttgagaaggttggaagtccctcaggggtagatgatacagattgttgtagtggttggctggaaggccctaataaggtgtatatcccatttctagcttgtggtgacctcagtgggtatgattctgatcgctcatatccactacctaaagttgccgggggaacatatcagagcttggatcctgtgcagccccctattgccccaccttacaagagagctttggagttaaaaaaagcttccagtcaaggattccgtgaacttgaaaacctctcattggattcttgatcgtgctatgcactgtttattcatcatgtcgtttggaattttagtttttgttacaatgatatgatttgtgttttgataattattagcgtacgtgtgaactttaacacttttttctcttgtaccatcattgcatgcctagcgagtcttttgttatcgcaattttttgaaatgaatacaactattttataaaaa

SEQ ID NO: 99 - protein, 316 aa, Glycine max
MGRASRDKRDIYYRKAKEEGWRARSAFKLLQIDEEFNLFDGVKRVVDLCAAPGSWSQVLSRKLYLPAKLAPDAKDENLPLIVAIDLQPMAPIEGVIQVQGDITNARTAEVVIRHFDGCKADLVVCDGAPDVTGLHDMDEFVQSQLLLAGLTIVTHVLKEGGKFIAKIFRGKDTSLLYCQLKLFFPVVTFAKPKSSRNSSIEAFAVCENYSPPEGFNPKDLHRLLEKVGSPSGVDDTDCCSGWLEGPNKVYIPFLACGDLSGYDSDRSYPLPKVAGGTYQSLDPVQPPIAPPYKRALELKKASSQGFRELENLSLDS

SEQ ID NO: 100 - DNA, 1201 bp, Zea mays
ccacgtcctcctccggctactcgctcgttccgccccggcgtcccgccctcagccgccgccgtcgccccctccctcggttcgcctcgtcgtcgtcatgggcaaggcctccaaggacaagagggacatctactaccggaaggccaaagaggaaggctggagagctcgcagcgccttcaagctcctccagatagaccaggagttcaacatcttccatggagtgaagcatgtggttgacctgtgtgctgctcccggaagttggagccaggttttgagccggaacctgtatgtaccagcaaaacagtcttctgattgcaaggaaggtgatcttcctctcatcgtcgcaattgacttgcaaccaatggccccaatagaaggtgttatacaagtgcagggcgacatcaccaatgctcggacagcagacgtggttattaggcattttgatggatgcaaagcagacttggttgtttgcgatggagccccggatgttactggccttcatgatatggatgaatttgttcagtcccagcttatactcgcggcattggctatcgtgactcatgtactcaaagttggtggaaaatttgtggcgaagatatttcggggtaaagatacaagtctcctgtactgccagctaaaactgttcttctcgcaagttacgttcgccaagccaaaaagtagccggaactcaagcatcgaggcgtttgcggtctgtgagaactactcacctcctgaagggttcaaggaggaagacctataccacctgctagagaaagtgggtactccctcaggagctggcgatctagattgcagaagcggatggctggagggaccaaacaaggtgtacatcccgttcctggcctgcggggatctcagcggctacgactccgaccgctcgtacccgctgcccagcagcacggacggtggctcgtaccggagcctggaccccgtgcagcctcccatcgccccgccttacaagaccgccctgcagatgaagaaggcttccagccacggcgccggcgcggacgccatcaagccgtccgcagactcctgagccgcagaccgtttccgtttaccaccttgcgcggtggaagttgctttcgctgggtcctggacctggctctctagtctctctctacagaaacagaaccttcatctacgaaactaaaaaaaaaggaaaaaggattggaaaaaaaaaaaaaaa

SEQ ID NO: 101 - protein, 318 aa, Zea mays
MGKASKDKRDIYYRKAKEEGWRARSAFKLLQIDQEFNIFHGVKHVVDLCAAPGSWSQVLSRNLYVPAKQSSDCKEGDLPLIVAIDLQPMAPIEGVIQVQGDITNARTADVVIRHFDGCKADLVVCDGAPDVTGLHDMDEFVQSQLILAALAIVTHVLKVGGKFVAKIFRGKDTSLLYCQLKLFFSQVTFAKPKSSRNSSIEAFAVCENYSPPEGFKEEDLYHLLEKVGTPSGAGDLDCRSGWLEGPNKVYIPFLACGDLSGYDSDRSYPLPSSTDGGSYRSLDPVQPPIAPPYKTALQMKKASSHGAGADAIKPSADS

SEQ ID NO: 102 - DNA, 732 bp, Tagetes erecta
aaagcaaaagaagaaggttggcgtgcacgaagtgcgtttaagctccttcaaattgatgaggagtttaacatctttgaaggagtgaagcgtgtggtcgatttatgcgcagcacctggtagctggagtcaggttttaagtcgtaagctgtatctcccagctaaacagtcatctgaccttccgcttatcgtggctattgatttacaacccatggctccaattgaaggtgtgatccaagttcaaggagatattacaaatgctagaaccgctgaagtggttattagacattttgacggatgcaaggctgacctagttgtctgtgacggtgctcctgatgtaactggacttcatgacatggacgaatttgttcagtcacaactgatattggcggggttgacaattgtcactcacattctcaagaaaggtggaaagtttattgcaaagatcttcaggggaaaggatacgagcctcttatattgtcagctaaaactatttttcacagaggttacgcttgcaaaaccaaaaagtagtcgaaattcaagcatagaggcatttgctgtttgtgagaattatacacctccagaaggattcaatgaaaaagatttgcatcgcctcctagagaaggtcggaactccatctggtgcagacaatttagattgtagtagtggatggttagaagggccaaacaaggtttatataccatttcttgcttgtggggaccttagtggttatgac

SEQ ID NO: 103 - protein, 244 aa, Tagetes erecta
KAKEEGWRARSAFKLLQIDEEFNIFEGVKRVVDLCAAPGSWSQVLSRKLYLPAKQSSDLPLIVAIDLQPMAPIEGVIQVQGDITNARTAEVVIRHFDGCKADLVVCDGAPDVTGLHDMDEFVQSQLILAGLTIVTHILKKGGKFIAKIFRGKDTSLLYCQLKLFFTEVTLAKPKSSRNSSIEAFAVCENYTPPEGFNEKDLHRLLEKVGTPSGADNLDCSSGWLEGPNKVYIPFLACGDLSGYD

SEQ ID NO: 104 - DNA, 1770 bp, Arabidopsis thaliana
atggctccgacgaatgttcaagtaaccgattaccatctcaaccaatcaaaaacggatacaacaaatctctggtcaaccgacgacgatgcatcggtaatggaagctttcatcggcggcggctccgatcattcttctctttttcctccacttcctcctcctcctcttcctcaagtcaacgaagataatctccagcaacgtctccaagctttaatcgaaggagcaaacgagaactggacttacgccgtgttctggcaatcatctcacggtttcgccggagaagacaacaacaacaacaacacagtgttgttaggttggggagatggttattacaaaggagaagaagagaagtctagaaagaagaaatcaaatccagctagtgcagctgaacaagagcatcgtaagagagtgattagagagctcaactctttaatctccggtggtgtaggaggaggagatgaagctggagatgaagaagttacagatactgaatggttcttcttagtttcaatgacacagagctttgtcaagggtactggtttacctggtcaagctttctcaaattcagacacgatttggttatctggttctaatgctttagctggatcaagttgtgagagagctcgtcaaggtcagatttatgggttacaaacaatggtgtgtgtagcgacagagaatggtgtcgttgagcttggttcgtcggagattattcatcaaagttcagatcttgttgataaagttgacacctttttcaattttaacaatggtggtggtgaatttggttcttgggcgtttaatttgaatccagatcaaggagagaatgatccaggtttgtggattagtgaacctaatggtgttgactctggtcttgtagctgctccggtgatgaataatggtggaaatgactcaacttctaattctgattctcaaccaatttctaagctttgtaatggaagctctgttgaaaaccctaaccctaaagttctgaaatcttgtgaaatggtgaatttcaagaatgggattgagaatggtcaagaagaagatagtagtaataagaagagatcaccggtttcgaataatgaagaagggatgctttcttttacctctgttcttccatgtgactcgaatcactctgatcttgaagcttcagtggctaaagaagctgagagtaacagagttgtggttgaaccggagaagaaaccgaggaaacgagggagaaaaccggcgaatggaagagaagagcctttgaatcatgtagaggcagagagacagagaagagagaagttgaatcagagattctattctttaagagctgtggttcctaatgtgtctaagatggataaagcttctctattaggagatgctatttcgtatatcagtgagcttaagtctaagttgcaaaaggctgaatctgataaagaagagttgcagaagcagattgatgtgatgaataaagaagcgggaaatgcgaaaagttcggtaaaagatcgaaaatgtttgaatcaagaatcgagtgtgttgatagagatggaggttgatgtgaagattattggttgggatgcaatgataaggattcaatgtagtaagaggaatcatcctggtgctaagttcatggaagcacttaaggagttggatttggaagtgaatcatgcgagtttatcggtagtgaatgatcttatgatccaacaagcgactgtgaaaatggggaatcagtttttcacgcaagatcaactcaaggttgctctaacggagaaagttggagaatgtccatga

SEQ ID NO: 105 - protein, 589 aa, Arabidopsis thaliana
MAPTNVQVTDYHLNQSKTDTTNLWSTDDDASVMEAFIGGGSDHSSLFPPLPPPPLPQVNEDNLQQRLQALIEGANENWTYAVFWQSSHGFAGEDNNNNNTVLLGWGDGYYKGEEEKSRKKKSNPASAAEQEHRKRVIRELNSLISGGVGGGDEAGDEEVTDTEWFFLVSMTQSFVKGTGLPGQAFSNSDTIWLSGSNALAGSSCERARQGQIYGLQTMVCVATENGVVELGSSEIIHQSSDLVDKVDTFFNFNNGGGEFGSWAFNLNPDQGENDPGLWISEPNGVDSGLVAAPVMNNGGNDSTSNSDSQPISKLCNGSSVENPNPKVLKSCEMVNFKNGIENGQEEDSSNKKRSPVSNNEEGMLSFTSVLPCDSNHSDLEASVAKEAESNRVVVEPEKKPRKRGRKPANGREEPLNHVEAERQRREKLNQRFYSLRAVVPNVSKMDKASLLGDAISYISELKSKLQKAESDKEELQKQIDVMNKEAGNAKSSVKDRKCLNQESSVLIEMEVDVKIIGWDAMIRIQCSKRNHPGAKFMEALKELDLEVNHASLSVVNDLMIQQATVKMGNQFFTQDQLKVALTEKVGECP

SEQ ID NO: 106 - DNA, 1130 bp, Oryza sativa
catgcggctaatgtagatgctcactgcgctagtagtaaggtactccagtacattatggaatatacaaagctgtaatactcgtatcagcaagagagaggcacacaagttgtagcagtagcacaggattagaaaaacgggacgacaaatagtaatggaaaaacaaaaaaaaacaaggaaacacatggcaatataaatggagaaatcacaagaggaacagaatccgggcaatacgctgcgaaagtactcgtacgtaaaaaaaagaggcgcattcatgtgtggacagcgtgcagcagaagcagggatttgaaaccactcaaatccaccactgcaaaccttcaaacgaggccatggtttgaagcatagaaagcacaggtaagaagcacaacgccctcgctctccaccctcccacccaatcgcgacgcacctcgcggatcggtgacgtggcctcgccccccaaaaatatcccgcggcgtgaagctgacaccccgggcccacccacctgtcacgttggcacatgttggttatggttcccggccgcaccaaaatatcaacgcggcgcggcccaaaatttccaaaatcccgcccaagcccctggcgcgtgccgctcttccacccaggtccctctcgtaatccataatggcgtgtgtaccctcggctggttgtacgtgggcgggttaccctgggggtgtgggtggatgacgggtgggcccggaggaggtccggccccgcgcgtcatcgcggggcggggtgtagcgggtgcgaaaaggaggcgatcggtacgaaaattcaaattaggaggtggggggcggggcccttggagaataagcggaatcgcagatatgcccctgacttggcttggctcctcttcttcttatcccttgtcctcgcaaccccgcttccttctctcctctcctcttctcttctcttctctggtggtgtgggtgtgtccctgtctcccctctccttcctcctctcctttcccctcctctcttcccccctctcacaagagagagagcgccagactctccccaggtgaggtgagaccagtctttttgctcgattcgacgcgcctttcacgccgcctcgcgcggatctgaccgcttccctcggccttctcgcaggattcagcc

SEQ ID NO: 107 - DNA, 53 bp, Artificial sequence
  primer: prm06763
ggggacaagtttgtacaaaaaagcaggcttaaacaatggctccgacgaatgtt

SEQ ID NO: 108 - DNA, 50 bp, Artificial sequence
  primer: prm06764
ggggaccactttgtacaagaaagctgggttgctgacttcaattcatggac

SEQ ID NO: 109 - DNA, 1779 bp, Arabidopsis thaliana
atgaacggcacaacatcatcaatcaacttcttgacctccgacgatgacgcgtcggcggcggctatggaagctttcattggaacaaaccaccactcatctctctttcctccaccaccacaacaaccacctcagcctcagttcaacgaagatactcttcaacaacgtctccaagctttaatagaatccgccggagaaaactggacttacgctatcttctggcagatctcacacgacttcgattcatccaccggagataacacagtgatcctcggctggggagatggttactacaaaggagaggaagataaagagaagaagaagaacaacaccaacacggcggagcaagagcatcggaaaagagtaatacgtgagcttaactcgttaatctccggcggaattggggtttccgatgaatcaaacgatgaagaagtaacagatactgaatggttcttcttagtttcgatgactcaaagcttcgttaacggtgttggtctccccggagaatctttcttaaactctcgtgtgatttggttatccgggtctggtgctttaaccgggtcgggttgtgaaagagcgggtcaaggtcagatttacgggttaaagacgatggtgtgtatcgcgactcaaaacggcgtcgttgagcttggttcgtcggaggttataagtcaaagctcagatctgatgcataaagttaacaacttgtttaatttcaacaacggtggtggaaacaatggtgttgaagcttcttcgtggggttttaatctgaatccagatcaaggagagaatgatccagctttgtggattagtgaaccgacgaacaccggaatcgaatctccggcgagggttaataatggtaataactcgaattctaattctaagtctgattctcatcaaatttctaagcttgagaagaatgatattagctctgtagagaatcagaatcgtcaaagttcgtgtcttgtcgagaaagatttgacctttcaaggtgggttgttgaaatctaatgagactttgagtttctgtggtaatgagagtagtaagaagagaacttcggtatctaaagggagtaataatgatgaagggatgctttcgtttagtactgtggttagatcagctgcgaatgattcggatcattctgatcttgaagcatctgttgttaaggaagcgattgttgttgagccaccggagaagaagccgaggaaacgggggaggaaaccggcgaatgggagagaagagccgttgaatcatgttgaagcagagaggcagagaagagagaagttaaaccagagattctactctttgagagctgttgttcctaacgtttcgaagatggataaagcttcgcttctcggagacgcgatttcgtatatcaatgagcttaagtcgaagctgcagcaagcggagtctgataaagaggagattcagaagaagctagatgggatgagtaaggaagggaataatgggaaaggttgcgggtcaagggcaaaagaacggaaaagttcgaatcaagattctacggcgagttctatagaaatggagattgatgttaagatcataggttgggatgtgatgatacgtgtacaatgcggcaagaaagatcatcccggtgctaggttcatggaagcacttaaggaattggatttggaagtgaatcatgcgagtttatccgttgtgaatgatttgatgattcaacaagctacggtgaagatggggagccaatttttcaatcatgaccagctcaaagttgctttgatgacgaaagtcggagaaaactattga

SEQ ID NO: 110 - protein, 592 aa, Arabidopsis thaliana
MNGTTSSINFLTSDDDASAAAMEAFIGTNHHSSLFPPPPQQPPQPQFNEDTLQQRLQALIESAGENWTYAIFWQISHDFDSSTGDNTVILGWGDGYYKGEEDKEKKKNNTNTAEQEHRKRVIRELNSLISGGIGVSDESNDEEVTDTEWFFLVSMTQSFVNGVGLPGESFLNSRVIWLSGSGALTGSGCERAGQGQIYGLKTMVCIATQNGVVELGSSEVISQSSDLMHKVNNLFNFNNGGGNNGVEASSWGFNLNPDQGENDPALWISEPTNTGIESPARVNNGNNSNSNSKSDSHQISKLEKNDISSVENQNRQSSCLVEKDLTFQGGLLKSNETLSFCGNESSKKRTSVSKGSNNDEGMLSFSTVVRSAANDSDHSDLEASVVKEAIVVEPPEKKPRKRGRKPANGREEPLNHVEAERQRREKLNQRFYSLRAVVPNVSKMDKASLLGDAISYINELKSKLQQAESDKEEIQKKLDGMSKEGNNGKGCGSRAKERKSSNQDSTASSIEMEIDVKIIGWDVMIRVQCGKKDHPGARFMEALKELDLEVNHASLSVVNDLMIQQATVKMGSQFFNHDQLKVALMTKVGENY

SEQ ID NO: 111 - DNA, 1833 bp, Brassica napus
atgacggagccgacgatgaatctctggaccaccgacgataacgcctctatgatggaagctttcatgagctcctcctccgacatctcagccttatggccaccggtaacgacgacggcaacggcgtcgactacagctccggcaccggcgggattcaacgaggagactctacagcaaaggctacaagcactgattgaagggacgaacgaaggctggacctacgctatattctggcagccgtcgtacgacttctccggtgcctccgtgctcggatggggcgatggttattacaaaggagaagaagacaaggcaaagcccagacagagaacgtctccaccgccgttttcaactccggcggatcaggagtatcgtaagaaggtgttgcgtgagctcaactcgttgatctccggcggaggtggtccgacggatgatgccgtcgatgaagaggtgacggatacggagtggtttttcttggtttcgatgacgcagagcttcgcttgcggttctgggttggcgggtaaggcgttctcgacgggtaacgcagtttgggtttatgggtcggatcagttaaccgggtcgggttgtgagcgggcgaagcaaggaggagtgtttgggatgcagaccatcgcgtgtattccttcggcgaacggggttgttgaactcgggccaacggagcagatccgacagagttcggatcttatgaacaaggtacgagtacttttcaatttcaacggtggcgctggagatttatcgtgtcttaactggaatcttgacccggatcaaggcgagaacgatccgtctatgtggattaacgacccgattggagtacccgagcagggtaacggagctccgagctctagctcccagctttttgccaagtcgatccagtttgagaatggtggtagttcaagcaccatcatcgaaaacccgaatccggatccagctccagctccgagcccggttcattcccagacccagaatccgaaattcagcaacaatttctcccgcgaattaaatttctccacgtcgagcaccaccttggtgaaaccaagacccgccgagatattgagcttcggcgatgagggtaaacggagctccgtgaacccggatccgagttcttattcgggtcagactcagttcgagaataagagaaagaagtccataggtatgagcgatgacaaggttctaactttcggaaccggcggaggagaatccgatcactccgatctagaagcctccgtcgtgaaagagataccggagaaacgtcccaagaaacgtggaagaaaaccggccaacggtagagaagagccgcttaaccacgtcgaagcagagagacagagacgcgagaaactaaaccagcgattctacgcgttacgtgcggttgtaccaaacgtctcgaaaatggataaagcttctttgctcggagacgcgattgcttacatcaacgagctgaagtctaaggtgaccaagacggaatctgagaaaactcagatcaaaacccagctcgaggaagtgaaaatggagctcgccggaagaaaagcaagcgccggtggagatctatcatcctcttgctcgttgacagcgatcaaacccgtggggatggagatcgaggtgaagattatcggttgggatgcgatgataagggtggaatcgagcaagaggaatcatccggcagcgaggttgatgtcggcgttgatggatctagagcttgaggtgaatcacgcgagtatgtcggtggttaacgatctgatgatacagcaagcgacggtgaagatgggattcagaatatacacgcaggaacagctccgggcgagtttaatctcaaagattggttaa

SEQ ID NO: 112 - protein, 610 aa, Brassica napus
MTEPTMNLWTTDDNASMMEAFMSSSSDISALWPPVTTTATASTTAPAPAGFNEETLQQRLQALIEGTNEGWTYAIFWQPSYDFSGASVLGWGDGYYKGEEDKAKPRQRTSPPPFSTPADQEYRKKVLRELNSLISGGGGPTDDAVDEEVTDTEWFFLVSMTQSFACGSGLAGKAFSTGNAVWVYGSDQLTGSGCERAKQGGVFGMQTIACIPSANGVVELGPTEQIRQSSDLMNKVRVLFNFNGGAGDLSCLNWNLDPDQGENDPSMWINDPIGVPEQGNGAPSSSSQLFAKSIQFENGGSSSTIIENPNPDPAPAPSPVHSQTQNPKFSNNFSRELNFSTSSTTLVKPRPAEILSFGDEGKRSSVNPDPSSYSGQTQFENKRKKSIGMSDDKVLTFGTGGGESDHSDLEASVVKEIPEKRPKKRGRKPANGREEPLNHVEAERQRREKLNQRFYALRAVVPNVSKMDKASLLGDAIAYINELKSKVTKTESEKTQIKTQLEEVKMELAGRKASAGGDLSSSCSLTAIKPVGMEIEVKIIGWDAMIRVESSKRNHPAARLMSALMDLELEVNHASMSVVNDLMIQQATVKMGFRIYTQEQLRASLISKIG

SEQ ID NO: 113 - DNA, 1959 bp, Lotus japonicus
atgaatctctggagcgacgacaactcctccgtcatggaggccttcatgacctcctccgacttatcctccgtctggccaccagcgccgcctcctccctctcaatcctccgtcgccgtcctcaaccaggacactctccagcaacgcctccaggccctaatcgaaggcgcaagagagacctggacctacgccattttctggcaaccttcctacgactactccggcacctccctcctcggctggggcgacggttactacaaaggcgaagaggacaaagccaaggcaaaagcaaaagccaaagccaaagccacctcctccgctgaacaagaacaccgccggaaggtgcttcgtgacttgaattccctcatctccggttcctccgcccccgcttctgatgacgctgtcgacgaagaggtcaccgacacggaatggttcttccttgtttccatgacccagtcgtttgtcaacggcggcgggctagctggtcaggcgtatttcaactccacccctgtttgggtcgccggcgctgatcgcctcgcagcctccgcctgcgagagggccaggcaggggcagctcttcggaatccagacgctcgtctgcgtgccgtctgcaaacggcgtcgttgaactcggatccactgagctgatttaccagaactccgatctgatgaacaaggtgaaggtgctgttcaatttcagcaacagcaacctcgatttgggttcttcctggacattgggttccaccaccaccgccgagaatgacccttccgccctctggctcgccgaccccgaccctgacggcagagattccgtcagcaccgtcgctcccaccaccgcttccgtttcgattcccagccaccacaacaacgatcagagcattgcgaagacgttgcagttcgaaacccctgtttcgagtaccttgactgaaaccccgagtgctgttaatctcacaaaccagccatcgcagaaccagagaaaccagagcagcttcttctccagggagatgaatttctccgagtacagtttcgatgcgaagaacggcagcagtaaccaccagcatctgaagccggaatccggtgagattctgagcttcggtgacagcaagagaacccccaatttcttctccggccagtcgcagttcgttccggctgtcgaggagaacaacaacgggaagaagaggtcaccgaattcgagaagcagcaacgacgacgggatgctttcattcacctccggcgtgattctcccgtcctcgaatttgaaatcctccaccggcggcggcgattcggagcattcagatctggaagcttcggtggtgaaggaagccgacagcagcaggttggtggagccggagaagcgacctaggaagagggggaggaaaccggcgaacggcagagaggaaccgttgaaccacgttgaagcagagaggcagaggagggagaagcttaaccagagattctacgcgcttcgcgcggtggttccgaacgtgtcgaagatggacaaagcttcactgctaggagacgctatatcctacatcacggagctgaagaccaagcttcagagttcagaatcggataaaactgggttgcagaagcaatttgatgcgatgaagaaggagctggagaaaaccagtgaacagtcttcttctccaactccacctccacctaacaagaacaagtccttctcctcatcctcctcctcttccaatcagattctagtggaggacattgacgtgaagatcattgggtgggatgcaatgataagggtccaatgcagcaagaagaaccacccggccgcgattttgatggcggcgttgatggagctggaccttgaggtgaaccatgctagtgtgtcagtggtgaatgataccatgatccagcaagcaacagtgaagatgggaagccgcttttacactcaggagcagcttcgatcagcactctcttccaaatttggggatgctccttag

SEQ ID NO: 114 - protein, 652 aa, Lotus japonicus
MNLWSDDNSSVMEAFMTSSDLSSVWPPAPPPPSQSSVAVLNQDTLQQRLQALIEGARETWTYAIFWQPSYDYSGTSLLGWGDGYYKGEEDKAKAKAKAKAKATSSAEQEHRRKVLRDLNSLISGSSAPASDDAVDEEVTDTEWFFLVSMTQSFVNGGGLAGQAYFNSTPVWVAGADRLAASACERARQGQLFGIQTLVCVPSANGVVELGSTELIYQNSDLMNKVKVLFNFSNSNLDLGSSWTLGSTTTAENDPSALWLADPDPDGRDSVSTVAPTTASVSIPSHHNNDQSIAKTLQFETPVSSTLTETPSAVNLTNQPSQNQRNQSSFFSREMNFSEYSFDAKNGSSNHQHLKPESGEILSFGDSKRTPNFFSGQSQFVPAVEENNNGKKRSPNSRSSNDDGMLSFTSGVILPSSNLKSSTGGGDSEHSDLEASVVKEADSSRLVEPEKRPRKRGRKPANGREEPLNHVEAERQRREKLNQRFYALRAVVPNVSKMDKASLLGDAISYITELKTKLQSSESDKTGLQKQFDAMKKELEKTSEQSSSPTPPPPNKNKSFSSSSSSSNQILVEDIDVKIIGWDAMIRVQCSKKNHPAAILMAALMELDLEVNHASVSVVNDTMIQQATVKMGSRFYTQEQLRSALSSKFGDAP

SEQ ID NO: 115 - DNA, 2070 bp, Lycopersicon esculentum
atgactgaatacagcttgcccaccatgaatttgtggaacaatagtactagcgatgataacgtttctatgatggaagcttttatgtcttctgatctttctttttgggctactaataattctacttctgctgctgcggttggtgtcaattcaaatcttcctcatgctagtagtaatactccctctgtttttgcaccatcttcttctacatctgcatctactttatccgcagctgcgactgtggatgcttccaaatctatgccgtttttcaaccaagaaacccttcagcagcgtcttcaagctcttattgatggtgctagagagacgtggacttatgctatcttttggcaatcgtcggttgttgatttctcaagtccgtctgtgttgggttggggagatggttattacaaaggggaagaagataaagcaaaaaggaaattatcggtgtcatcacctgcttatattgctgagcaggagcatcggaagaaggttctacgggagctgaattcgttgatttccggggcaccacccggaacggatgatgcggttgatgaagaagttaccgacaccgaatggttctttcttatctccatgacccaatcgtttgttaatggaagtgggcttcctggtcaggcgttgtatagttccagcccgatttgggtcgccggaactgagaaattggcagcttcacactgtgaacgtgtgaggcaagcacaagggttcgggctccagacgattgtctgtattccttcagctaacggcgtggttgaattgggctcgacggagttgattgttcaaagttctgatcttatgaacaaggttagagtattgtttaacttcagtaatgatttgggttctggttcatgggctgtgcagccggagagcgacccatcggcgctctggctcactgatccatcgtcctcaggtatggaagttagagagtctttaaatacagttcaaacaaattcagttccatctagtaatagtaataagcaaattgcttatggaaatgagaataatcatccatctggaaatggtcagagttgttacaatcagcaacaacagaagaatcctcctcagcaacaaacacaaggactcttcacgagggagttgaatttttcggaattcggtttcgatggaagtagtaataggaatggaaattcatcggtttcttgcaagcctgaatcaggagaaatcttgaattttggtgatagtactaaaaaaagtgcttccagtgccaatgtgaacttgtttacaggtcagtcccaatttggggctggggaggagaataataacaagaacaagaaaagatcagctacttccaggggaagcaatgaagaaggaatgctttcatttgtttcaggtacagtggtgccttcttcgggcatgaagtcaggtggaggcggaggcgaagactctgaacattcagatctcgaggcttcagtggtgaaagaagctgatagtagtagagtggtagagcctgaaaagaggccaaggaagcgaggtagaaagccagcgaatggacgggaggagccattgaatcacgtcgaggcagagaggcaaaggagggagaaattgaaccaaagattctacgcgcttagagctgttgtaccaaatgtgtctaagatggacaaggcatcactccttggagatgctatttcctatataaacgagttgaaatcgaagcttcaaaatacagagtcagataaagaagacttgaagagccaaatagaagatttaaagaaagaatcaaggcgccccggtcctcctccaccaccaaatcaagatctcaagatgtctagccacactggaggcaagattgtagacgtggatatagacgttaagatcatcggatgggatgcaatgattcgtatacaatgtaataaaaagaatcatccagccgcaaggctaatggcagcgctcatggaattagacctagacgtgcatcatgccagtgtttcagttgtcaacgatttgatgatccaacaagccacagtgaaaatgggtagcaggaattacactgaagagcagcttagggtagcgttgacatcgaaaattgctgaaacacactaa

SEQ ID NO: 116 - protein, 689 aa, Lycopersicon esculentum
MTEYSLPTMNLWNNSTSDDNVSMMEAFMSSDLSFWATNNSTSAAAVGVNSNLPHASSNTPSVFAPSSSTSASTLSAAATVDASKSMPFFNQETLQQRLQALIDGARETWTYAIFWQSSVVDFSSPSVLGWGDGYYKGEEDKAKRKLSVSSPAYIAEQEHRKKVLRELNSLISGAPPGTDDAVDEEVTDTEWFFLISMTQSFVNGSGLPGQALYSSSPIWVAGTEKLAASHCERVRQAQGFGLQTIVCIPSANGVVELGSTELIVQSSDLMNKVRVLFNFSNDLGSGSWAVQPESDPSALWLTDPSSSGMEVRESLNTVQTNSVPSSNSNKQIAYGNENNHPSGNGQSCYNQQQQKNPPQQQTQGLFTRELNFSEFGFDGSSNRNGNSSVSCKPESGEILNFGDSTKKSASSANVNLFTGQSQFGAGEENNNKNKKRSATSRGSNEEGMLSFVSGTVVPSSGMKSGGGGGEDSEHSDLEASVVKEADSSRVVEPEKRPRKRGRKPANGREEPLNHVEAERQRREKLNQRFYALRAVVPNVSKMDKASLLGDAISYINELKSKLQNTESDKEDLKSQIEDLKKESRRPGPPPPPNQDLKMSSHTGGKIVDVDIDVKIIGWDAMIRIQCNKKNHPAARLMAALMELDLDVHHASVSVVNDLMIQQATVKMGSRNYTEEQLRVALTSKIAETH

SEQ ID NO: 117 - DNA, 1992 bp, Vitis vinifera
atgacggaatatcgtgtgccaaccatgaatctgtggaccgacgataacgcttctatgatggaggcttttataagctctgatctctcttcctttagttgggggccatcctccgctgcttctacgtctactcctgcgcctgacccgtcaaggaatctcgcccaatctcagccttccatggccgtcttcaaccaggagaccctccagcagcgacttcaagccctaattgaaggcgcccgagagagctggacctacgcaattttttggcagtccagcgttgatttctcgggtgcctctttgttaggatggggtgacggctactataaaggtgaggaagataaagggaagaggaagatgaccccgtcgtctgtttccgagcaggagcaccggaagaaagtgctccgggagctgaattcgctcatttctgggacggcgtcgtcgtcggacgacgctgtcgatgaggaggtcaccgacaccgagtggttcttccttgtatcgatgactcagtcgtttgtgaacggcgctgggttgccgggtcaggcgctcttcaactcgagtccggtgtgggttgtcggaaccgaacggctcatgagttctccttgcgagagagcccggcaggcgcaggtgttcgggttacagactatggtttgtataccatcggctaacggcgtcgtcgaactgggctccaccgaattgatttaccagagctcagatctgatgaacaaggttagagttttgttcaatttcaataaccttgaagttggttcatggccgatcggagccgccgctcccgaccagggcgagagcgatccttcgtcgctctggatctccgatccgacctctaatgtcgaaatcaaggattctgtgaatgctacagctactggagcttccaatcccattggtaatcagcagaattccaagtcaattcaatttgagaaccctagctcaagtagtttaactgaaaaccctagtattatgcataatcctcagcagcaacagcagattcacacgcagggttttttcactagggagttgaatttctcagaatttggatttgatggaaayaatgggagaaatggtaacttgcattccctgaagcccgagtctggggaaattttgaattttggagacagtaagaggagttcttgtagtgcgaatgggaatatgttttcaggtcattcacaggtagttgcagaggaaaataagaagaggaggtcaccgacttcaagaggaagtgccgaagaaggcatgctttcgtttacttcaggtgtgatattgccatcctcttgtgtggtgaagtcaagtggtggtggtggagattctgatcactcggatcttgaagcttcagtggttcgggaggcagatagtagtagagtggtggaaccagaaaaaaggcctaggaagcgtgggagaaaacctgcaaatggaagggaagagccattgaatcatgtggaggcagagcggcagaggagggagaagcttaaccagaggttttatgccctccgagctgtggttccaaatgtgtcaaagatggataaagcctcccttcttggtgatgcaatttcatatatcaatgagctcaggacaaagctacaaagtgcagagtcggacaaggaggaccttcagaaggaagtgaattcaatgaagaaggagttggctagtaaagatwcacagtactccggttcatctcgaccacctccagaccaagatctcaagatgtcgaatcaccacggtagcaaattggtagaaatggatattgatgtgaagataatcgggtgggatgccatgattcgaattcagtgtagtaaaaagaaccatcctgctgcaaagcttatgggggctctcaaggagctggacctagatgtgaaccacgcgagtgtgtcggtggtgaatgatttgatgatccaacaggcaaccgtgaagatgggaagtaggttttacactcaagatcagctgaggctagccctgtcatccaaatttgcagacagcaggtag

SEQ ID NO: 118 - protein, 663 aa, Vitis vinifera
  misc_feature (556)..(556): Xaa can be any naturally occurring amino acid
MTEYRVPTMNLWTDDNASMMEAFISSDLSSFSWGPSSAASTSTPAPDPSRNLAQSQPSMAVFNQETLQQRLQALIEGARESWTYAIFWQSSVDFSGASLLGWGDGYYKGEEDKGKRKMTPSSVSEQEHRKKVLRELNSLISGTASSSDDAVDEEVTDTEWFFLVSMTQSFVNGAGLPGQALFNSSPVWVVGTERLMSSPCERARQAQVFGLQTMVCIPSANGVVELGSTELIYQSSDLMNKVRVLFNFNNLEVGSWPIGAAAPDQGESDPSSLWISDPTSNVEIKDSVNATATGASNPIGNQQNSKSIQFENPSSSSLTENPSIMHNPQQQQQIHTQGFFTRELNFSEFGFDGNNGRNGNLHSLKPESGEILNFGDSKRSSCSANGNMFSGHSQVVAEENKKRRSPTSRGSAEEGMLSFTSGVILPSSCVVKSSGGGGDSDHSDLEASVVREADSSRVVEPEKRPRKRGRKPANGREEPLNHVEAERQRREKLNQRFYALRAVVPNVSKMDKASLLGDAISYINELRTKLQSAESDKEDLQKEVNSMKKELASKDXQYSGSSRPPPDQDLKMSNHHGSKLVEMDIDVKIIGWDAMIRIQCSKKNHPAAKLMGALKELDLDVNHASVSVVNDLMIQQATVKMGSRFYTQDQLRLALSSKFADSR

SEQ ID NO: 119 - DNA, 2145 bp, Zea mays
atgaacctgtggacggacgacaacgcctccatgatggaggccttcatggcttctgccgacctccccaccttcccctggggagcgccggccgggggcggcaactcgtcggccgccgcggcgtcgccgccgccgcagatgccagcggcgatggctcccgggttcaaccaggacacgctgcagcagaggctacaagccatgatagaggggtcgagggagacctggacctacgccatcttctggcagtcctcccttgactccgccaccggcgcctcgctgctcggctggggggacggctactacaagggctgcgacgaagacaagcgcaagcagaagccgctcacgccctccgcccaggccgagcaggagcaccgcaagcgcgtgctccgcgagctcaactccctcatctccggcgcggcggcggctcccgacgaggccgtcgaggaggaggtcaccgataccgagtggttcttcctcgtctccatgacgcagtcgtttctcaacggttcgggcctccccgggcaggcgctcttcgccgggcagcccacatggatcgcctctggcctctcctccgcgccgtgcgagcgcgcgcgtcaggcctacaacttcggcctccgcaccatggtatgcttccccgtcggcaccggggtgctcgagctcggctccaccgacgtcgtgttcaagaccgccgagagcatggctaagatccgctcgctctttgggggcggagcagggggtggctcgtggccgcccgtgcagcctcaggcgccgtcgtcgcagcagcccgccgccggagccgaccacgcggagacggacccgtccatgctatggctcgccgacgcgccggtcatggacatcaaggattccttgtcgcacccgtcggccgagatctccgtctccaagcctccgccgcatccgccgcagatccattttgagaacgggagcacgagcacgctcacggagaaccccagcccctccgtgcacgcgccgccacccccgccggcgccggctgctccacagcagcggcagcaccagcaccagaatcaggcgcaccagggcccgttccgccgggagctcaatttctcggacttcgcgtccactccttccttggcggcgaccccgccgttcttcaagcccgagtccggcgagatcctcagcttcggcgccgacagcaacgcccggaggaacccgtcgccggtacctcccgccgccaccgccagcctcaccaccgctcccgggagcctcttctcgcagcacacggcgaccatgacggccgccgcggcgaacgacgcgaagaacaacaacaagcgctcaatggaggccacctcccgggcgagcaacaccaaccaccacccggcggcgacggcgaacgagggcatgctgtccttctcgtcggcgccgactacgcggccgtcgacgggcacgggcgcgccggccaagtcggagtccgaccactcggacctggacgcgtctgtgcgcgaggtggagagcagccgcgtggtggcgccgccaccggaggcggagaagcggccgcgaaagcgcgggcggaagcccgcgaacgggcgcgaggagccgctgaaccacgtggaggcggagcggcagcggcgggagaagctgaaccagcgcttctacgcgctgcgcgccgtggtgcccaacgtgtcgaagatggacaaggcgtcgctgctcggcgacgccatctcctacatcaacgagctccggggcaagctgacgtcgctggagaccgacaaggagacgctgcagacccaggtggaggcgctcaagaaggagcgcgacgcgcggccgccctcgcactccgctgggctcggcgggcacgacggcgggccgcgctgccacgcggtggagatcgacgccaagatcctggggctggaggccatgatccgcgtgcagtgccacaagcgcaaccacccgtcggcgcggctgatgacagcgctccgcgagctcgacctggacgtgtaccacgccagcgtgtccgtcgtcaaggacctcatgatccagcaggtcgccgtcaagatggccagccgcgtgtacacgcaggaccagctcagcgccgcgctctacagccgcctcgcggagcccgggtctgccatgggcaggtaatgaaggaggagagctgctcagctcggctcg

SEQ ID NO: 120 - protein, 704 aa, Zea mays
MNLWTDDNASMMEAFMASADLPTFPWGAPAGGGNSSAAAASPPPQMPAAMAPGFNQDTLQQRLQAMIEGSRETWTYAIFWQSSLDSATGASLLGWGDGYYKGCDEDKRKQKPLTPSAQAEQEHRKRVLRELNSLISGAAAAPDEAVEEEVTDTEWFFLVSMTQSFLNGSGLPGQALFAGQPTWIASGLSSAPCERARQAYNFGLRTMVCFPVGTGVLELGSTDVVFKTAESMAKIRSLFGGGAGGGSWPPVQPQAPSSQQPAAGADHAETDPSMLWLADAPVMDIKDSLSHPSAEISVSKPPPHPPQIHFENGSTSTLTENPSPSVHAPPPPPAPAAPQQRQHQHQNQAHQGPFRRELNFSDFASTPSLAATPPFFKPESGEILSFGADSNARRNPSPVPPAATASLTTAPGSLFSQHTATMTAAAANDAKNNNKRSMEATSRASNTNHHPAATANEGMLSFSSAPTTRPSTGTGAPAKSESDHSDLDASVREVESSRVVAPPPEAEKRPRKRGRKPANGREEPLNHVEAERQRREKLNQRFYALRAVVPNVSKMDKASLLGDAISYINELRGKLTSLETDKETLQTQVEALKKERDARPPSHSAGLGGHDGGPRCHAVEIDAKILGLEAMIRVQCHKRNHPSARLMTALRELDLDVYHASVSVVKDLMIQQVAVKMASRVYTQDQLSAALYSRLAEPGSAMGR

SEQ ID NO: 121 - DNA, 1683 bp, Brassica napus
atggatgatcatcggaatcgtgtctctctctctccaccggatgctcacatgagcaactacttcctcaaccagtcaacagccaccgacgacgataacgcctccgcctcgatggaagctttcatcggaacaaatcactggtcacaacaaccatcccttcctcctcctccgtcattgtctcagttcaacgaagatactctccagcaacgtctccaaacgctaatcgaatccgcgggtgagagatggacgtacgcgatcttctggcagatctcgcacgatttcgactctcccgccggagagagcacggtgattctcgggtggggagacgggtactacagaggagaggaagacaaagagaagaagaagaaacagagctcgagctcgaatccggcggagcaggagcatcggaaaagagtaatccgggagcttaactcgttaatcgccggcggagccggagtttccgacgaagccaacgacgaggaagttacggatacagagtggttcttcttggtttcgatgactcagagcttcgtaaacggcgttgggctccccggagagtcttttttaaactcccgcgtgatttggttatccgggtcgggtgcgttaaccgggtcaggctgcgagcgggcgaggcaaggggaggtttacgggttgcagacgatagtgtgtatcgctgcggaaaacggcgtcgttgagcttggttcgtcggaggtgataagtcaaagctcagatctgatggataaagtcaacggtcttttcaacggtaacggtaacggggaagcttcttcttgggggtttaatctcaatcctgatcaaggtgagaacgatcctgctttgtggttatctgaaccgaacataaccggaatcgaaccggttcaggaaacgcccgcgattgagaacgccgctgatttgaacttctcgagctcagggctgaaccaaaacggtaactttaaacaagggtcgtcaagcaacaagaagagatctccggttgggaaagacgaagaaatgctttctttcagcacggtggttcgatccgcggcgaagtcagtggactctgatcattccgatatcgaagcatcggtggttaaggaggcgattatcgtcgaaccggagaagaaaccgaggaaacgggggagaaaaccggctaacgggagagaagagccgttgaaccatgtggaagcagagaggcagcgaagggagaagctaaaccagagattctactcgttgagagctgtggttcccaacgtttcgaaaatggacaaggcttctcttcttggagacgccatttcgtatatcaacgagctgaaaacgaagctgcagcaagcggagaccgataaggaagaggttcagaagcagctagatcggatgagcaaggaaggtggcgggtctaggagggcgaaagagcgaaaatcgaacctagattccgcgagttctgtggaaatggagattgatgtgaagatcataggttgggatgtgatgatacgtgtacaatgcggcaagaagaatcatcctggtgcgaggttcatggaagcgcttaaggagttggatttggaagtgaatcatgctagtttatctatggtgaatgatttgatgattcaacaagctactgtgaagatgggaagccagtttttcaatcatgatcagctcaaggctgctttaatgttgaaagttggagaagacagttga

SEQ ID NO: 122 - protein, 560 aa, Brassica napus
MDDHRNRVSLSPPDAHMSNYFLNQSTATDDDNASASMEAFIGTNHWSQQPSLPPPPSLSQFNEDTLQQRLQTLIESAGERWTYAIFWQISHDFDSPAGESTVILGWGDGYYRGEEDKEKKKKQSSSSNPAEQEHRKRVIRELNSLIAGGAGVSDEANDEEVTDTEWFFLVSMTQSFVNGVGLPGESFLNSRVIWLSGSGALTGSGCERARQGEVYGLQTIVCIAAENGVVELGSSEVISQSSDLMDKVNGLFNGNGNGEASSWGFNLNPDQGENDPALWLSEPNITGIEPVQETPAIENAADLNFSSSGLNQNGNFKQGSSSNKKRSPVGKDEEMLSFSTVVRSAAKSVDSDHSDIEASVVKEAIIVEPEKKPRKRGRKPANGREEPLNHVEAERQRREKLNQRFYSLRAVVPNVSKMDKASLLGDAISYINELKTKLQQAETDKEEVQKQLDRMSKEGGGSRRAKERKSNLDSASSVEMEIDVKIIGWDVMIRVQCGKKNHPGARFMEALKELDLEVNHASLSMVNDLMIQQATVKMGSQFFNHDQLKAALMLKVGEDS

SEQ ID NO: 123 - DNA, 1899 bp, Glycine max
atgaatctgtggacggacgagaactcctcggtgatggaggccttcatgagctcctccgacctctcctccctctggctccccacgccgcaatccgccgcctctactaccactcctggactggaaaccacccgagcaccgccgcctcagtcccactccctcctcaaccaggagaccctccagcagcgcctccagacacttatcgaaggcgcccgagagagctggacctacgcaatcttctggcagtcttcctacgactattcctccggcacctcccttctcggctggggagacggttattacaagggtgaggaggacaaagtcaaagccaaaggcaaaacccccaaaacgacgtcgtccgcggagcaggaccaccgcaaaaaagtcctccgcgaactcaattccttaatctctggcccctccgcttccgttgacgacgtcgacgaagaagtcaccgacaccgagtggttcttcctcgtgtcgatgactcagtccttcgtcaacggaagcggcctcccgggtcaggctttttttaactcgagcccggtctgggttgccgggccggaccggctgtccgagtcggtctgcgaacgggcccaccaggggcagatgttcgggctccagactctggtctgcataccgtccgcaaatggcgtcgttgagctcgcctccacggaggtgattttccagaaccctgatctgatgaacaaggtgcgcgatttgttcaacttcaacaacaaccctgaaactggttcctgggcgttgaattgcgttgccaccaccgatcagggggagaacgacccttcctcactctggctcaaccctgaaatcagagactcctctaccgttgcgccgccgaattcaacggttaacaagactctgcagttcgaaacccctggttccagtaccttaaccgatacccctagtgctgctgctgttcatgtacctaaatctaatggccagggtttcttctcgagggaattgaacttttcgaattcattgaagcctgaatctggtgaaattctgagctttggagagagcaagaagagctcttacaacgggagtttctttcccggtgttgttgcaattgaggagaacaacaagaagaggtctcccgtttctcggagcagcattgacgatgggatgctgtccttcacatccctgccggctgcaaatataaaatctggtagtggtggtgccggtgccggtggtggtgattcggatcactcggatctggaagcttccatggtgaaacaggcagacagcagagtgatggagccggagaaacggcctcggaagagggggcgaaagccggccaacggcagagaggagccgctgaatcacgtggaagccgagagacaaaggagagaaaagctgaatcaaagattctatgctctacgagctgtagttccaaatgtatccaagatggacaaggcatcgttgttaggtgacgccatatcgtacataaatgagctgaaattgaagctcaacgggctggattcagagaaaggggaattggagaagcaattggattcagccaagaaggaacttgagctcgcgaccaaaaaccctcctcctcctccaccaccaccacctggactacctccatctaataacgaagaagcaaagaagacaacgaccaagctcgctgatttggagatagaggtgaagataattggttgggatgcgatgataagaatccaatgcagcaagaagaaccaccctgcagcaaggttgatggcagcattgaaggacctggacttggaagtgcatcacgcaagcgtgtccgtggtgaatgatttaatgatccaacaagccacggtgaacatgggaaacaagttttacacgcaggagcagcttctgtcggcactctcgtccaaagttggcgatgaactacgatag

SEQ ID NO: 124 - protein, 632 aa, Glycine max
MNLWTDENSSVMEAFMSSSDLSSLWLPTPQSAASTTTPGLETTRAPPPQSHSLLNQETLQQRLQTLIEGARESWTYAIFWQSSYDYSSGTSLLGWGDGYYKGEEDKVKAKGKTPKTTSSAEQDHRKKVLRELNSLISGPSASVDDVDEEVTDTEWFFLVSMTQSFVNGSGLPGQAFFNSSPVWVAGPDRLSESVCERAHQGQMFGLQTLVCIPSANGVVELASTEVIFQNPDLMNKVRDLFNFNNNPETGSWALNCVATTDQGENDPSSLWLNPEIRDSSTVAPPNSTVNKTLQFETPGSSTLTDTPSAAAVHVPKSNGQGFFSRELNFSNSLKPESGEILSFGESKKSSYNGSFFPGVVAIEENNKKRSPVSRSSIDDGMLSFTSLPAANIKSGSGGAGAGGGDSDHSDLEASMVKQADSRVMEPEKRPRKRGRKPANGREEPLNHVEAERQRREKLNQRFYALRAVVPNVSKMDKASLLGDAISYINELKLKLNGLDSEKGELEKQLDSAKKELELATKNPPPPPPPPPGLPPSNNEEAKKTTTKLADLEIEVKIIGWDAMIRIQCSKKNHPAARLMAALKDLDLEVHHASVSVVNDLMIQQATVNMGNKFYTQEQLLSALSSKVGDELR

SEQ ID NO: 125 - DNA, 1457 bp, Glycine max
atgaccgagtaccggatgaacctgtggaccgacgacaactcctccgtcatggaggccttcatgagctcctccgacctctcctccctctggcttgccacgccgcagtccgccacctccaccacaactccaggcacggcaaaagcccctcctcctcctcctcctcctccgccgccgccggcgcagtcccagtccctcctcaaccaggagactctccagcaacgcctccagactctcatcgaaggcgcctgcgagagctggacctacgcaatcttctggcaatcttcctacgactattcctccggcacctcccttctcggctggggagacggttactacaagggcgaggaggacaaagacaaagtcaaaaccaaagcccccaaaacgaggtcgtccgcagagcaggaccatcgtaagaaggtcctccgcgaacttaattccttaatttccggcccttccgcttcagctgacgacattgacgaagaagtcaccgacaccgagtggttcttcctggtgtcgatgactcagtccttcgtcaacggtagcgggctgccgggccaggctttttttaactcgagcccggtctgggtcgccgggcccgaaagactttccgaatcggcctgcgaacgggcccgccaggggcagctcttcgggctccagactcttgtctgtataccgtccgcaaacggcgtcgtcgagctcgcctccgcggaggtcatttttcagaaccccgatctgatgaacaaggtgcgtgatttgttcaacttcaacaacaacaacaacaacaacaaccctgaaacgtgttcctgggcgttgaattgcgttgccaccaccgatcaaggcgagaacgacccttcctcgctctggctcaaccctgaaatcaaagactcctccaccgtctcgccgccgaattccacggttaataagacgatgcatttcgaaacccctggttccagtaccctaaccgaaacccctagcgctgctgctgctgttcacgtccccaattctaaaagccagggattcttcccgagggaattgaacttttcgaattcattgaaacctgaatccggtgaaattctgagctttggggagagcaagaagagctcttacaatggggctttctttcccggtgttgttgcggttgaggagaacaacaacaataacaagaacaagaagaagaggtccccggtggtttctcggagcagcattgacgatggaatgctttccttcacttccctgccggctgcaaatataaaatcagttaacggtgcttgtgtcggtgccggtgattcggatcactcggatctggaagcttccgtggcgaaacaggtggtggagcccgagaaacggccccggaagagagggcgaaagccggctaacggaagagaggaaccactaaatcatgtggaagccgagagacagaggagagaaaagctgaaccaaagattctatgctctacg

SEQ ID NO: 126 - protein, 654 aa, Glycine max
MTEYRMNLWTDDNSSVMEAFMSSSDLSSLWLATPQSATSTTTPGTAKAPPPPPPPPPPPAQSQSLLNQETLQQRLQTLIEGACESWTYAIFWQSSYDYSSGTSLLGWGDGYYKGEEDKDKVKTKAPKTRSSAEQDHRKKVLRELNSLISGPSASADDIDEEVTDTEWFFLVSMTQSFVNGSGLPGQAFFNSSPVWVAGPERLSESACERARQGQLFGLQTLVCIPSANGVVELASAEVIFQNPDLMNKVRDLFNFNNNNNNNNPETCSWALNCVATTDQGENDPSSLWLNPEIKDSSTVSPPNSTVNKTMHFETPGSSTLTETPSAAAAVHVPNSKSQGFFPRELNFSNSLKPESGEILSFGESKKSSYNGAFFPGVVAVEENNNNNKNKKKRSPVVSRSSIDDGMLSFTSLPAANIKSVNGACVGAGDSDHSDLEASVAKQVVEPEKRPRKRGRKPANGREEPLNHVEAERQRREKLNQRFYALRAVVPNVSKMDKASLLGDAILYINELKSKLNVLDSEKTELEKQLDSTKKELELATKNPPPPPPPPPPPGPPPSNSVEPKKTTSKLADLELEVKIIGWDAMVRIQCSKKNHPAARLMAALKDLDLEVHHASVSVVNDLMIQQATVNMGNKFYTQEQLLSALSSKVGDELR

SEQ ID NO: 127 - DNA, 2025 bp, Hordeum vulgare
atgatggaggccctcatggcctccgccgacatgccggcgttcccctggggcgcggcggccaccccgccgccgccggccgccgtgccggccttcaaccaggacacgctccagcagcgcctgcaggccatcatcgagggctccagggagacctggacctacgccatcttctggcagtcctccaccgacgccggcgcctcgctcctcggctggggcgacggctattacaagggctgcgacgacgccgacaagcgccgccagcagcccaccccggcctccgccgccgagcaggagcaccgcaagcgcgtcctcagggagctcaactcgctcatagccgggggcggcgccgccgcgcccgacgaggccgtcgaggaggagggcacggacaccgagtgggtcttcctcgtctccatgacccagtccttccccaacgggatgggcttgccgggccaggctctcttcgccggccagcctatctggatcgccaccgggctcgccagcgcgccctgcgagcgggccaagcaggcctacaccttcggcctccgcaccatggtctgcatccccctcggcaccggcgtgctcgagctcggcgccaccgaggtcatcttccagaccaccgatagcttggggcggatccgctcgctcttcagcctcaacggcggaggagggggctctggatcctggccgcccgtggcgccgccgccccaggaggcggagacggatccgtccgtgctctggctcgccgacgcgccggccggggacatgaaggagtcgccgccgtccgtcgagatctccgtctccaagccgccgccgtcacagccgccgcagatccatcacttcgagaacgggagcaccagcacgctcacggagaaccccagcctctccgtgcacgcgcagcagcctctgccgcagcagcaggcggcggcggcggcgcagaggcagaaccagctccagctccagcaccagcacaaccagggtcctttccgccgggagctcaatttctcagatttcgcgtccaacccatccgtcacggtgaccccgcctttcttcaagcctgagtctggtgagatcctaaactttggcgctgacagcaccagccggaggaacccttcgccggcgccccccgccgcgacggccagcctcaccaccgcgccggggagcctcttctcccagcacacggcgacggtgacggccccatcaaacgacgccaagaacaacccgaagcggtccatggaggccacctcccgcgcgagcaacaccaaccaccaccagaccgcgacagccaacgaggggatgctgtccttctcgtccgcgccgacgacgcggccgtccaccggcacgggcgcaccagccaagtcggagtccgaccattccgacctggaggcgtcggtccgcgaggtggagagcagccgcgtggtgcctccgccggaggagaagcggccgcgcaagcgcgggcgcaagccggcgaacgggcgcgaggagccactgaaccacgtggaggcggagcggcagcggcgggagaagctgaaccagcggttctacgcgctccgcgccgtggtgcccaacgtgtccaagatggacaaggcctcactgctgggcgacgccatctcctacatcaacgagctccgcggtaagatgacggcgctggagtcggacaaggagacgctccactcccaaattgaggcgctgaagaaggagcgcgacgcccggccggccgcgccgtcgtcgtcgggaatgcacgacaacggggcgcggtgccacgcggtggagatcgaggccaagatcctggggctggaggcgatgatccgcgtgcagtgccacaagcgcaaccacccggcggcgaagctgatgacggcgctgcgggagctggacctggacgtgtaccacgccagcgtctcggtggtgaaggacatcatgatccagcaggtggcggtgaagatggccacccgggtctactcccaggaacagctcaacgcggcgctctacggccgcctcgccgagccgggcgccgcgatgcaaatccggtaa

SEQ ID NO: 128 - protein, 674 aa, Hordeum vulgare
MMEALMASADMPAFPWGAAATPPPPAAVPAFNQDTLQQRLQAIIEGSRETWTYAIFWQSSTDAGASLLGWGDGYYKGCDDADKRRQQPTPASAAEQEHRKRVLRELNSLIAGGGAAAPDEAVEEEGTDTEWVFLVSMTQSFPNGMGLPGQALFAGQPIWIATGLASAPCERAKQAYTFGLRTMVCIPLGTGVLELGATEVIFQTTDSLGRIRSLFSLNGGGGGSGSWPPVAPPPQEAETDPSVLWLADAPAGDMKESPPSVEISVSKPPPSQPPQIHHFENGSTSTLTENPSLSVHAQQPLPQQQAAAAAQRQNQLQLQHQHNQGPFRRELNFSDFASNPSVTVTPPFFKPESGEILNFGADSTSRRNPSPAPPAATASLTTAPGSLFSQHTATVTAPSNDAKNNPKRSMEATSRASNTNHHQTATANEGMLSFSSAPTTRPSTGTGAPAKSESDHSDLEASVREVESSRVVPPPEEKRPRKRGRKPANGREEPLNHVEAERQRREKLNQRFYALRAVVPNVSKMDKASLLGDAISYINELRGKMTALESDKETLHSQIEALKKERDARPAAPSSSGMHDNGARCHAVEIEAKILGLEAMIRVQCHKRNHPAAKLMTALRELDLDVYHASVSVVKDIMIQQVAVKMATRVYSQEQLNAALYGRLAEPGAAMQIR

SEQ ID NO: 129 - DNA, 2112 bp, Zea mays
atgaacctgtggacggacgacaacgcctccatgatggaggccttcatggcctccgccgacctccccgcctacccctggggggcgccggccgggggcggcaacccgccgccgccgcagatgccgccggcgatggcgatggcgccggggttcaaccaggacacgctgcagcagcggctgcaggccatgatcgaggggtccagggagacctggacctacgccatcttctggcagtcctccctggacgccgccaccggcgcgtcgctgctaggctggggcgacggctactacaagggctgcgacgacgacaagcgcaggcaccgcccgccgctcacgcccgccgcgcaggccgagcaggagcaccgcaagcgcgtgctccgcgagctcaactccctcatctccggcggcgcctccgccgcgcccgcgcccgcgcccgacgaggccgtcgaggaggaggtcaccgacaccgagtggttcttcctcgtctccatgacgcagtccttcctcaacggctcgggcctccccggccaggcgctcttcgcgggccaccacacctggatcgccgccggcctctcctccgcgccgtgcgaccgcgcgcgccaggcctacaacttcggcctccgcaccatggtctgcttccccgtcggcacgggcgtgctcgagctcggctccaccgacgtcgtgttccagaccgccgagaccatggccaagatccgctcgctcttcgggggcgggccggggggtggctcgtggccgcccgtgcagccccaggcggcgccgcagcagcagcacgccgccgaagccgaccaggcggcggagacggacccatccgtgctgtggctcgccgacgcgccggtcgtggacatcaaggattcctactcgcacccgtcggcggccgagatctccgtctccaaaccgcctccgcctccgcctccgccgcagattcacttcgagaacgggagcacgagcacgctcacggagaaccccagcccctccgtgcacgcgccgccagccccgccggcgccaccgcagcggcagcagcagaatcagggcccgttccgccgggagctcaacttctcggatttcgcgtccaatccttccttggcggcggccccgccgttcttcaagcccgagtccggcgagatcctcagcttcggcgtcgacagcaacgcccagaggaacccgtcgccggcgcctcccgccagcctcaccaccgctcccggcagcctattctcgcagtcgcagcacacggcgaccgccgcggcgaacgacgcgaagaacaacaacaacaacaacaagcgttcgatggaagccacctccctggcgagcaacaccaaccaccacccggcggcggcggcgaacgagggcatgctgtccttctcgtcggcgccgaccgcgcggccgtcggcaggcacgggcgcgccggccaagtcggagtccgaccactcggacctggacgcgtccgtgcgcgaggtggagagcagccgcgtcgtggcgccgccgccggaggcggagaagcggccgcggaagcgcgggcggaagcccgcgaacgggcgcgaggagccgctgaaccacgtggaggcggagcggcagcggcgggagaagctgaaccagcgcttctacgcgctgcgcgccgtggtgcccaacgtgtccaagatggacaaggcgtcgctgctcggcgacgccatctcctacatcaacgagctccgcggcaagctgacgtcgctggagtcggacagggagacgctgcaggcccaggtcgaggcgctcaagaaggagcgcgacgcgcggccgcacccgcaccccgctgccgggctcggcgggcacgacgccggcgggccgcgctgccacgcggtagagatcgacgccaagatcctggggctggaggccatgatccgcgtgcagtgccacaagcgcaaccacccgtcggcgcggctgatgacggcgctccgcgagctcgacctggacgtgtaccacgccagcgtctccgtcgtcaaggacctcatgatccagcaggtcgccgtcaagatggccagccgcatgtactcgcaggaccagctcagcgccgcgctctacagccgccttgcggagcccgggtctgtcatgggcaggtaa

SEQ ID NO: 130 - protein, 703 aa, Zea mays
MNLWTDDNASMMEAFMASADLPAYPWGAPAGGGNPPPPQMPPAMAMAPGFNQDTLQQRLQAMIEGSRETWTYAIFWQSSLDAATGASLLGWGDGYYKGCDDDKRRHRPPLTPAAQAEQEHRKRVLRELNSLISGGASAAPAPAPDEAVEEEVTDTEWFFLVSMTQSFLNGSGLPGQALFAGHHTWIAAGLSSAPCDRARQAYNFGLRTMVCFPVGTGVLELGSTDVVFQTAETMAKIRSLFGGGPGGGSWPPVQPQAAPQQQHAAEADQAAETDPSVLWLADAPVVDIKDSYSHPSAAEISVSKPPPPPPPPQIHFENGSTSTLTENPSPSVHAPPAPPAPPQRQQQNQGPFRRELNFSDFASNPSLAAAPPFFKPESGEILSFGVDSNAQRNPSPAPPASLTTAPGSLFSQSQHTATAAANDAKNNNNNNKRSMEATSLASNTNHHPAAAANEGMLSFSSAPTARPSAGTGAPAKSESDHSDLDASVREVESSRVVAPPPEAEKRPRKRGRKPANGREEPLNHVEAERQRREKLNQRFYALRAVVPNVSKMDKASLLGDAISYINELRGKLTSLESDRETLQAQVEALKKERDARPHPHPAAGLGGHDAGGPRCHAVEIDAKILGLEAMIRVQCHKRNHPSARLMTALRELDLDVYHASVSVVKDLMIQQVAVKMASRMYSQDQLSAALYSRLAEPGSVMGR

SEQ ID NO: 131 - DNA, 1074 bp, Arabidopsis thaliana
atgacagaactcaacttccacctcctcccaataatctccgatcgcttcacgacgacgacgacaacatcaccgtcgttctcgtcacattcttcttcttcttcttctcttctctctttcaccaaacgaagacgaaaacaccaacctttagtatcatccatacgcatggaacagtcacggtcacggaatcggaaagacaaagtcgtcgtcattttaggagcaaccggcgccggaaaatcaagactttccgtcgatctcgctactcgtttcccttcagagatcataaactccgataaaatccaagtctacgaaggattagagatcacaacgaatcagattacgttacaagaccgtcgcggcgttcctcaccatctcctcggcgtcatcaaccccgaacacggcgaactaaccgccggagagtttcgctccgccgcttcaaacgtcgtcaaagtgataacttctcgtcaaaaggttccgattatcgccggtggatctaactctttcgtccacgcactcttagctcaacgattcgacccaaagttcgatcctttttcatccgggtcgtgtttaatcagctccgatttgcgttacgagtgttgtttcatctgggtcgatgtatcggagactgttctctacgagtatcttctcagaagagtcgacgaaatgatggattcaggtatgttcgaagagctgtctagattctacgacccggttaaatccggtttagaaacccggtttgggattaggaaagctataggtgtaccggagtttgacggttacttcaaagagtatccaccggagaagaagatgataaagtgggacgctttaagaaaagcggcgtacgataaggcggttgatgatatcaaaaggaacacgtggacgttagcgaagagacaagtgaagaagattgagatgctaaaagacgctggttgggaaatagaaagagttgatgcaacggcgtcgtttaaagcagtgatgatgaagagttcgtcggagaagaagtggagagagaattgggaagagcaagtgttggagccaagcgtaaagattgtgaagcggcatttggtgcaaaattag

SEQ ID NO: 132 - protein, 357 aa, Arabidopsis thaliana
MTELNFHLLPIISDRFTTTTTTSPSFSSHSSSSSSLLSFTKRRRKHQPLVSSIRMEQSRSRNRKDKVVVILGATGAGKSRLSVDLATRFPSEIINSDKIQVYEGLEITTNQITLQDRRGVPHHLLGVINPEHGELTAGEFRSAASNVVKVITSRQKVPIIAGGSNSFVHALLAQRFDPKFDPFSSGSCLISSDLRYECCFIWVDVSETVLYEYLLRRVDEMMDSGMFEELSRFYDPVKSGLETRFGIRKAIGVPEFDGYFKEYPPEKKMIKWDALRKAAYDKAVDDIKRNTWTLAKRQVKKIEMLKDAGWEIERVDATASFKAVMMKSSSEKKWRENWEEQVLEPSVKIVKRHLVQN

SEQ ID NO: 133 - DNA, 654 bp, Oryza sativa
cttctacatcggcttaggtgtagcaacacgactttattattattattattattattattattattttacaaaaatataaaatagatcagtccctcaccacaagtagagcaagttggtgagttattgtaaagttctacaaagctaatttaaaagttattgcattaacttatttcatattacaaacaagagtgtcaatggaacaatgaaaaccatatgacatactataattttgtttttattattgaaattatataattcaaagagaataaatccacatagccgtaaagttctacatgtggtgcattaccaaaatatatatagcttacaaaacatgacaagcttagtttgaaaaattgcaatccttatcacattgacacataaagtgagtgatgagtcataatattatttttcttgctacccatcatgtatatatgatagccacaaagttactttgatgatgatatcaaagaacatttttaggtgcacctaacagaatatccaaataatatgactcacttagatcataatagagcatcaagtaaaactaacactctaaagcaaccgatgggaaagcatctataaatagacaagcacaatgaaaatcctcatcatccttcaccacaattcaaatattatagttgaagcatagtagta

SEQ ID NO: 134 - DNA, 55 bp, Artificial sequence
  primer: prm03095
ggggacaagtttgtacaaaaaagcaggcttcacaatgacagaactcaacttccac

SEQ ID NO: 135 - DNA, 49 bp, Artificial sequence
  primer: prm03096
ggggaccactttgtacaagaaagctgggtaactaattttgcaccaaatg

SEQ ID NO: 136 - DNA, 957 bp, Arabidopsis thaliana
atgaagtgtaatgacaaaatggttgtgatcatgggtgccaccggttctggcaagtcatcactctctgttgatctcgctttacattttaaagccgagatcatcaactctgacaaaatgcagttctacgatggcttgaagatcaccacgaatcaatcgaccattgaagatcgacgtggagtgccacatcaccttctcggtgaactaaacccggaggctggagaagtcacagcggcagaatttcgcgttatggcggctgaagccatctccgagattactcaacgtaaaaagctcccaatccttgccggtggatccaactcatacattcatgctctccttgcaaaatcttatgaccctgaaaactatccgttttctgatcacaagggctcaatctgctccgagttgaaatatgattgttgtttcatttggatagatgtggatcagtctgtgttattcgagtatctttctttacgtttggatcttatgatgaagtcaggtatgttcgaggagatcgctgagttccaccgctctaagaaggccccgaaagagccattggggatatggaaggctataggagtgcaagagtttgatgactacctcaaaatgtacaagtgggacaatgacatggataaatgggaccctatgagaaaggaggcttatgagaaggcggtgagagccatcaaagaaaacacatttcagctcacaaaggatcaaatcacgaagatcaacaagctgagaaatgccgggtgggacataaagaaggtggatgctacagcatcgtttcgagaggcaattagggcagccaaggaaggcgaaggtgtagccgagatgcagagaaagatatggaacaaggaagtgttggaaccgtgtgtgaagattgtcaggagccacttggaccaaccgatcaactattattattattacttttatttactaaaaagatttttaagtcttaactag

SEQ ID NO: 137 - protein, 318 aa, Arabidopsis thaliana
MKCNDKMVVIMGATGSGKSSLSVDLALHFKAEIINSDKMQFYDGLKITTNQSTIEDRRGVPHHLLGELNPEAGEVTAAEFRVMAAEAISEITQRKKLPILAGGSNSYIHALLAKSYDPENYPFSDHKGSICSELKYDCCFIWIDVDQSVLFEYLSLRLDLMMKSGMFEEIAEFHRSKKAPKEPLGIWKAIGVQEFDDYLKMYKWDNDMDKWDPMRKEAYEKAVRAIKENTFQLTKDQITKINKLRNAGWDIKKVDATASFREAIRAAKEGEGVAEMQRKIWNKEVLEPCVKIVRSHLDQPINYYYYYFYLLKRFLSLN

SEQ ID NO: 138 - DNA, 1029 bp, Arabidopsis thaliana
atgcaacaactcatgaccttgttatcaccaccactctctcattcttctctccttcccaccgtcactaccaaattcgggtcaccacgattagtcactacgtgcatgggccatgcagggcgtaaaaatatcaaggataaggtggttctcatcacaggtacaacaggcacaggcaagtcacgcctctcagtcgatcttgccacccgtttttttcccgccgagatcataaactcggacaaaatgcaaatctacaagggattcgagattgtcacaaatctaatcccactgcatgagcaaggaggagtcccgcaccatcttctaggtcagttccacccacaagacggtgaactcacccctgcagagttccgttctttggcgacactgtccatctctaaactaatttctagcaagaaactcccgattgtagttggtggatccaactccttcaatcacgctctactcgccgagcgttttgacccggatattgatccattctctcccggatcgagtctttcaacgatctgctctgacctaaggtacaaatgttgcatcttatgggttgatgttttagagccggttctgttccaacacttgtgcaatcgtgtcgaccaaatgatcgagtcgggattggtcgagcagcttgccgaattgtacgaccctgttgtagattcgggtcgacgactaggggttcggaagacgataggagtagaggagttcgaccgatactttagagtataccctaaggagatggacaagggaatttgggacttagcgagaaaggcggcgtacgaggagacagtgaaggggatgaaagagaggacatgtcggttggtgaagaagcagaaagagaagatcatgaagctgataagaggtggttgggagattaagaggcttgacgctacggcggcaattatggctgagctgaatcaaagtacggcaaagggagaaggaaagaatgggagagagatttgggaaaaacacattgtggatgaaagtgtcgagattgtcaagaagtttttgttggaagtttag

SEQ ID NO: 139 - protein, 342 aa, Arabidopsis thaliana
MQQLMTLLSPPLSHSSLLPTVTTKFGSPRLVTTCMGHAGRKNIKDKVVLITGTTGTGKSRLSVDLATRFFPAEIINSDKMQIYKGFEIVTNLIPLHEQGGVPHHLLGQFHPQDGELTPAEFRSLATLSISKLISSKKLPIVVGGSNSFNHALLAERFDPDIDPFSPGSSLSTICSDLRYKCCILWVDVLEPVLFQHLCNRVDQMIESGLVEQLAELYDPVVDSGRRLGVRKTIGVEEFDRYFRVYPKEMDKGIWDLARKAAYEETVKGMKERTCRLVKKQKEKIMKLIRGGWEIKRLDATAAIMAELNQSTAKGEGKNGREIWEKHIVDESVEIVKKFLLEV

SEQ ID NO: 140 - DNA, 1137 bp, Humulus lupulus
agccggaagaagaccagggtgggcacgcatggactacgcatccgttgccatggctgccgcgcccaccacaacaaccactaccaacgtatcactccgtcgccagcgacaccggaaagagaagcttctcgttctaatgggcgccaccggtaccgggaagtcccgtctctccatcgacctcgcggcgcacttccctctcgaagtcataaactcggataaaatgcaggtttataaaggactggatatcacgacgaacaagatatcggtaccggaccggggcggcgtgccacaccatctcctcggtgaggttgacccggctcgaggtgagttgactcctgccgatttcaggtctttggctggaaaagccgtgtctgaaatcactgggaggagaaagcttcccgtcctggtgggtgggtccaactcgttcatacatgcgctgttggtggaccggtttgactcgtcgggcccgggcgtgttcgaggaagggtcccactcggtggtgtcttctgagttgagatacgactgttgctttctctgggttgacgtgtcggtaaaggtattgaccgattacttggcgaagcgagtcgacgacatgttggagctggggatgttcgatgagttggccgagttctatagcccggaggacgaggaccacgacgaagactctgcgactcggaccgggttgagaaaagccatcggagttcccgagtttgaccggtatttcgaaaagttcagacctggcgacgtggagggggaggaccccgggagggatcgggtgcggaggggcgcattcgaagaggcggtgagggcgatcaaggagaacacgtgtcatctagcgaagagacaaatagggaagatcttacgattaaaaggcgctgggtgggacctacggcggctggacgcaacagagtcgttccgggcggcgatgacgtcagactccggcgagaagtgcacggagatttgggagaagcaggtattggaaccaagcgtgaagattgtgagtcgcttcttggacgagtaggttttgccagcaatttccagctcattttttcttttatttttttgagtttgttaaaaaaaaattttggtagttagttttcccacggaaaaattttcaacttgtcacaattacaaattaat

SEQ ID NO: 141 - protein, 329 aa, Humulus lupulus
MDYASVAMAAAPTTTTTTNVSLRRQRHRKEKLLVLMGATGTGKSRLSIDLAAHFPLEVINSDKMQVYKGLDITTNKISVPDRGGVPHHLLGEVDPARGELTPADFRSLAGKAVSEITGRRKLPVLVGGSNSFIHALLVDRFDSSGPGVFEEGSHSVVSSELRYDCCFLWVDVSVKVLTDYLAKRVDDMLELGMFDELAEFYSPEDEDHDEDSATRTGLRKAIGVPEFDRYFEKFRPGDVEGEDPGRDRVRRGAFEEAVRAIKENTCHLAKRQIGKILRLKGAGWDLRRLDATESFRAAMTSDSGEKCTEIWEKQVLEPSVKIVSRFLDE

SEQ ID NO: 142 - DNA, 1335 bp, Lotus japonicus
ctctctttcttcttcttcctatgagactttcctctctctcacctcacccccaccaccaccaccactacaccacacactaccattaccattaccaccacccctcttcactcgccatggacggccaccgccgcatagacaaggtggttgtcatcatgggcgccaccggctccggcaaatcccgcctctccatcgacctcgccaccctctttcccttctcagagatcatcaactccgataaaatgcaagtctacaaaggactcgacaccaccaccaacaagatcccacctcaccaacgcaacaacgtcccccaccacctcctcggcgacgtcgacccttctctcggtgatttcaccccctccgacttccgccgccgcgccggtgacctcatctccgacatcacccgccgcagaaagctccccatcttcgtcggcggctccaactccttcgtccacgccctccttgtcgaccgattcgaccccgagtccaacgtcttccgcgacgattcaccctcgccggtttcctccgagttgagataccggtgctgcttcctctggatggacattgcgttccccgtgctgtcggagtatttgctgaagcgagtcgacgacatgcttgactcgggaatggtggacgagttggctcagttcttcgactcggacacagcgaaccagaccgggttgagaaaagccatcggtgtacccgagttcgaccggtttttcaaggatccggtgcgggagggtgcagcgtacgaggaagcggtgagggcgattaaggagaacacgtgtcagctagcgaagaggcagattgggaagatcatgcggttaaaaagagcagggtgggacttacggaggatcgacgccacggaagcgttccgggtggcgcttgtggcagacggcggcggagagagattttccgatgaatggaagaggcaagtgttggaaccaagcgtgaagattgtgaagcggttcttgatggagtaggtttgggttttccagctaaatccagctattccacttcctctttaaatttttcttttttttttcttcttctctttttttgcgtttatttcacccccaaataagacaaaaaatgaaagtgggaaattggggggaaaatgtacaaaaatgggagtggaaattgttaatttgaatccactagtttggttgagtgagtgatttcagagagggaatgagcatggatcattaaatttttggtcttggagttactagcaactagcaactagcaactagcaacaaggcttggctcatgtgagattccacaatttttctcaaggcaatagaaatggatatttagtataaaaaaaaaaaaaaaaaa

SEQ ID NO: 143 - protein, 319 aa, Lotus japonicus
MRLSSLSPHPHHHHHYTTHYHYHYHHPSSLAMDGHRRIDKVVVIMGATGSGKSRLSIDLATLFPFSEIINSDKMQVYKGLDTTTNKIPPHQRNNVPHHLLGDVDPSLGDFTPSDFRRRAGDLISDITRRRKLPIFVGGSNSFVHALLVDRFDPESNVFRDDSPSPVSSELRYRCCFLWMDIAFPVLSEYLLKRVDDMLDSGMVDELAQFFDSDTANQTGLRKAIGVPEFDRFFKDPVREGAAYEEAVRAIKENTCQLAKRQIGKIMRLKRAGWDLRRIDATEAFRVALVADGGGERFSDEWKRQVLEPSVKIVKRFLME

SEQ ID NO: 144 - DNA, 1120 bp, Medicago truncatula
atgccaacaacaacaacaacaccttcatttctctcacctcctcactctcaacgtcattatcataaacccattcaatttcaccactattcacacaccctttttactccttcctcttcctccgccacccacaccaggcggcggccccactgccctcgcatggaaatctccccctcacgccaccgtcggaaagacaaagtcctcattatagtcggtgcaaccggctccggaaaatcacgtctctccgttgaactcgccaccctcttcccttactcagaaataattaattccgacaaaatccaagtgtacagaggactcgatatcaccaccaacaagatcccatttcatcaacgcaacaacgttccacatcatcttctcggcgacattgatccttctcacggtgagttctcaccttcagatttccgccgccacgccggagatatcatctccgatattacttcccggagaaaacttcccattatcgttggtgggtccaactcattcattcacgctcttcttgtagaacgattcgaccctgagtcaaacgttttcgacgagtcatcatcattgtcaacatcgatatcctcggatttaaggtacaaatgttgttttctttggatggatatttcgtttcctgtgttgtcggaatatttgctgaaacgagtcgatgatatgtttgactcgggaatggtgaacgagttagctgagttttatgaaccggatgcagataaccaaaccggtttaagaaaagcaatcggtgtacccgagttcgaccggttttttaaacaatatccaccacaggttggaccagatgaatctgaacgtcataatccaatgcgggaaggtgcatatattgaagcagtgaaggcgattaaagataacacgtgtcagttagctaagagacagatagggaagatcttacggttaaaaagagctgggtgggacctacaacggattgatgccacggaggcgtttagggcggtgctgacgtcagagtctaacggcggtggagaagaatttaccggtgtatggaaaaaacaagtattggaaccaagcgtgaagattgtgaagcgtttcttgatggagtaggtcttccagctaaatccagcttagctaatccaac

SEQ ID NO: 145 - protein, 361 aa, Medicago truncatula
MPTTTTTPSFLSPPHSQRHYHKPIQFHHYSHTLFTPSSSSATHTRRRPHCPRMEISPSRHRRKDKVLIIVGATGSGKSRLSVELATLFPYSEIINSDKIQVYRGLDITTNKIPFHQRNNVPHHLLGDIDPSHGEFSPSDFRRHAGDIISDITSRRKLPIIVGGSNSFIHALLVERFDPESNVFDESSSLSTSISSDLRYKCCFLWMDISFPVLSEYLLKRVDDMFDSGMVNELAEFYEPDADNQTGLRKAIGVPEFDRFFKQYPPQVGPDESERHNPMREGAYIEAVKAIKDNTCQLAKRQIGKILRLKRAGWDLQRIDATEAFRAVLTSESNGGGEEFTGVWKKQVLEPSVKIVKRFLME

SEQ ID NO: 146 - DNA, 1105 bp, Morus alba
gcccgggcaggtccggccactacctctggcccacgagacaggtgggcgcggatggagttttcctcctccgccgcccgccgccaccgccaccatcccaaggacaagctcctcgtcatcatgggcgccaccggcaccggcaaatcccgactctccgtcgagctcgccacccacttcaacggcgagatcatcaactccgacaaaatgcaagtctacaagggactcgacacaacgaccaacaagattcccctcgacgaccgcctcggtgtcccccaccaccttctcggcgaggtcgactcggaagctcacggcgagttgactcgctccgagttccgctccttggccggaaaggccgtgtcggaaatcaccgccaggaggaaactcccagtcctcgccggcggctccaactccttcattcacgccctgctcgtggaccggttcgacccggaatacgacgttttcgacgagcggtccgaccaaccggcggattcgtcgaaggttctcctccgctacaactgttgcttcctttgggtggatgtttcgttgagggttttggaagattatttattgaagcgagtcgatgacatgctcaactcggggatgttcgacgagttggccgagttctacgacccggaggaggatcacggaccggcgaactggaccggattgaggaaggctataggcgtgcccgagtttgaccggtatttcgagaggtgcagaccgggggagaaaggagagtgggatcgggtgcggagggaagcatacgaggaggcggtgagggaaataaaggagaacacgtgtcagctggcgaagagacagattggaaagattctgagattaaagaagttggggtgggacctacggaggttggacgcgacggaggcgtttagggcggtgatgacgtcagattccggtaagaggtgttcggaaatttgggagaggcaggtattggaaccaagcgtgaagattgtgaagcgcttcttggacgagtagtaggttttgccagcactttccagctaatttttatttttattatttttttgttgtttttttaaaaaaattttggtagttagttttccaacttcaacttcagctcaaaaaaaaaaaa

SEQ ID NO: 147 - protein, 312 aa, Morus alba
MEFSSSAARRHRHHPKDKLLVIMGATGTGKSRLSVELATHFNGEIINSDKMQVYKGLDTTTNKIPLDDRLGVPHHLLGEVDSEAHGELTRSEFRSLAGKAVSEITARRKLPVLAGGSNSFIHALLVDRFDPEYDVFDERSDQPADSSKVLLRYNCCFLWVDVSLRVLEDYLLKRVDDMLNSGMFDELAEFYDPEEDHGPANWTGLRKAIGVPEFDRYFERCRPGEKGEWDRVRREAYEEAVREIKENTCQLAKRQIGKILRLKKLGWDLRRLDATEAFRAVMTSDSGKRCSEIWERQVLEPSVKIVKRFLDE

SEQ ID NO: 148 - DNA, 1083 bp, Oryza sativa
atgaccagcgttgccaccaggattgccacgctcgtgcgggccgcggcggcggcgagccggccattgcggctccaccgccggcccggcggcgaggatacgaggatggtggtgatcgtcggcgccacgggcaccgggaagaccaagctgtccatcgacgccgccaaggtgatcggcggcgaggttgtcaacgccgacaagattcagctctatgacggcctcgacgtgaccaccaacaaggtgagcctcgccgaccgccgtggcgtgccgcaccacctcctcggagccatccgccccgaggccggcgagctcccgccgtcgtccttccggtccctcgccgccgccacggccgcgtcgatcgcggcgaggcggctcgtgccggtcatcgccggtgggtcgaactccctcatccacgccctcctcgccgaccacttcgacgcctccgctggcgatcccttctcccccgccgccgccttccgccactaccgcccggcgctccggttcccgtgctgcctgctctgggtccacgtcgatgaggcgctcctcgacgagtacctcgaccgccgcgtggacgacatggtggacgctggcatggtcgaggagctccgggagtacttcgccacgacaaccgccgcggagcgcgccgcgcactccgggctgggcaaggccatcggcgtccccgagctcggcgactacttcgccgggcgcaagaccttctccgaggcgatcgacgacatcaaagccaacacccgcgtcctcgccgccgcgcaggtgtccaagatccgccgcatgtccgacgcctggggctggcccatccaccgcctcgacgcctccgacacagtccgcgccaggctcacgcgggcgggctccgccgccgagtccgcctcctgggagcgcgacgtgcgcggcccaggcctcgccaccatccgcagcttcctcgccgatcagtcaccgccaccgcgcagcgagggcaccaacgactacctgtacgccatggagacggaaccagagccgccgccgccgccgacgttgccgccgcggctgctccggttgccgcggatgcagtactgcgacatggtggggtga

SEQ ID NO: 149 - protein, 360 aa, Oryza sativa
MTSVATRIATLVRAAAAASRPLRLHRRPGGEDTRMVVIVGATGTGKTKLSIDAAKVIGGEVVNADKIQLYDGLDVTTNKVSLADRRGVPHHLLGAIRPEAGELPPSSFRSLAAATAASIAARRLVPVIAGGSNSLIHALLADHFDASAGDPFSPAAAFRHYRPALRFPCCLLWVHVDEALLDEYLDRRVDDMVDAGMVEELREYFATTTAAERAAHSGLGKAIGVPELGDYFAGRKTFSEAIDDIKANTRVLAAAQVSKIRRMSDAWGWPIHRLDASDTVRARLTRAGSAAESASWERDVRGPGLATIRSFLADQSPPPRSEGTNDYLYAMETEPEPPPPPTLPPRLLRLPRMQYCDMVG

SEQ ID NO: 150 - DNA, 1053 bp, Petunia x hybrida
atgttaattgtagtacatattattagcatcacacgcatcatattcatcaccttaacccataatcatctccatttccttatgtttagatcattatcatacaatcacaagcacctcaaattccttacaaacccgaccacacgggtactccgaagaaacatgtcgtcatccactgtagtaacaatacccggccccacacaaaaaaacaaaaacaaaatcatagtaataatgggtgcaacaggttcaggaaaatcaaaactctcaatagacctcgtcacacgtcactatcctttttccgaaatcattaactccgacaaaatccaaattaccaaaggtttaaacataaccacaaacaaaatcactgtacccgaccgacgtggcgtagttcatcatttactcggcgagattgaccccgactttaacttttctccttctcatttccggtcaattgctggtcaacgcattaactccattattaatcgccataaactcccattcctcgttggtgggtccaactcatatatctacgctttattaacaaaccggttcgacccggattttaaccctgattcaaacccggttcattttatatccaacgagttacgctacaactgttgttttatttgggtcgatgtattaaacccggttttgaatgagtatttggataaacgggtcgatgagatgatgaactcgggtatgtatgaagaactggaacagttttttaaagaaaacaggttttcggatccgggtttggaaccgggtcgggccaccgggttgaggaaagcgataggggtaccggaaatggagaggtattttaagaagagctgtacgtatgaggaagcagtgagggaaataaaagaaaacacgtggcggttagcgaagaagcagatgtggaagatccaacggttgagagaagcagggtgggacctacaaagagtagatgccacggaggcatttgtggaggcgatgagtaataagaaggaaaagggaattatttgggaaaaacaagtagtggaaccaagtgtcaagattgtgaaccgttttttgttggactga

SEQ ID NO: 151 - protein, 350 aa, Petunia x hybrida
MLIVVHIISITRIIFITLTHNHLHFLMFRSLSYNHKHLKFLTNPTTRVLRRNMSSSTVVTIPGPTQKNKNKIIVIMGATGSGKSKLSIDLVTRHYPFSEIINSDKIQITKGLNITTNKITVPDRRGVVHHLLGEIDPDFNFSPSHFRSIAGQRINSIINRHKLPFLVGGSNSYIYALLTNRFDPDFNPDSNPVHFISNELRYNCCFIWVDVLNPVLNEYLDKRVDEMMNSGMYEELEQFFKENRFSDPGLEPGRATGLRKAIGVPEMERYFKKSCTYEEAVREIKENTWRLAKKQMWKIQRLREAGWDLQRVDATEAFVEAMSNKKEKGIIWEKQVVEPSVKIVNRFLLD

SEQ ID NO: 152 - DNA, 1199 bp, Populus tremuloides
cttactctgtttttttttttttcgttgcctatgaaaattcccttcccaaagagtaccaatcagcctctttacactgcccttaaaacccaaccacttcaccccattaacatttctatacccttcaataagccacgcccaccaccaatagcagtccgtatggacacggactcctctaccaccacctccaccgccgtctaccgccataaaaaagacaagattctcgtaataatgggagcgactgggtgtggcaaaacaagggtatctattgatctagctacacgcttccaatccgaaatcatcaactccgacaaaatgcaagtctacgaaggtcttgacatcaccaccaacaaaatcaccattcaagaccgtctaggtgttcctcaccatttactcggtgagttcgacccggatgatggtgagttgactccctccgagtatcggttagctggtggattggctatctcaggtattgtttcaaggcaaaatcttcctattgtggttggtgggtccaactcacttattcacgctttggttgttgaccggtttaatcccgagttaaacgtttttgatgggtgtaacccagtttcaacccagttaagatataactgttgttttttgtgggtggatgtgtcattacctgttttgtgcgattacttgtgtaagcgagtcgacgaaatgctcgactccgggatgctcgatgagctgtcagagtattatggctcagttgatgcagcgagtcaaatcgggttgaggaaagcgattggggtgcctgagtttgatcggtatttcaaaaagtacccacctgggtctgggtgtggcagaggtattggtgtggaatgggatcgggtacggaggggagtatacgaggtctgtgtgagggagataaaggagaacacgtgtcagcttgcgaaaaggcagatcggcaagatcttgagattaaaaggggcagggtgggacctaaaaagagttgatgcgactgagagctttagggaggtgatgacggtgacgtcagatgatcatatcaagaaaagaaagaagaagaggtggatggaggtctgggggagagatgtgatggagccaagcatgaaaattgtgaaacgcttcttggaggaggagtaggagtaggttttacagtcagtcagccagtcaatccatcaatcaatcaatccagcttttttcccgctaccgttctggttttc

SEQ ID NO: 153 - protein, 362 aa, Populus tremuloides
MKIPFPKSTNQPLYTALKTQPLHPINISIPFNKPRPPPIAVRMDTDSSTTTSTAVYRHKKDKILVIMGATGCGKTRVSIDLATRFQSEIINSDKMQVYEGLDITTNKITIQDRLGVPHHLLGEFDPDDGELTPSEYRLAGGLAISGIVSRQNLPIVVGGSNSLIHALVVDRFNPELNVFDGCNPVSTQLRYNCCFLWVDVSLPVLCDYLCKRVDEMLDSGMLDELSEYYGSVDAASQIGLRKAIGVPEFDRYFKKYPPGSGCGRGIGVEWDRVRRGVYEVCVREIKENTCQLAKRQIGKILRLKGAGWDLKRVDATESFREVMTVTSDDHIKKRKKKRWMEVWGRDVMEPSMKIVKRFLEEE

SEQ ID NO: 154 - DNA, 1094 bp, Populus tremuloides
ctcaacgacaacgtctcaggaaattcaacaatgaccatgaggctttctttgaccgcctacaaacaagtacagcctcgtgggaatttccaaggggggctaaacatgaaacctttctttcgtcgaaaagataaggttgtgttcgttgttggaccgactggcacaggcaaatcaaggctggctattgacctggcaacccgtttcccagccgaggttgtcaattgtgacaaaatgcaagtttataaaggcctcgatatagtcacaaacaaggtcactgaagaggagtgtcgcggtgtgcctcatcatttacttggcatagcagaccctaatgcaaatttcacttccgatgacttcaggcaccatgcatcacttgttgtcgaatcaatcgtcacacgtgatcggctaccgatcatcgccggtggatcaaattcctacatcgaggctttagcaaatgatgatcctgaatttcgattaaggtatgaatgttgttttctttgggtggacgtgtcactcccaatactttattcattcgtatcagagcgggtcgatcgaatggtggaagcaggcttgattgatgaggtgagagatatgtttgatcctaataaatttgatgattattcacaaggaatcaaacgggcaattggggttcctgaattggatcattttttacgaaatgaggcgattgtggatgctaaaactcgtagaaagcttcttgatgaggccattgataaaattaaagaaaatacttgtatgctagcctctcgacaattacaaaaaatccatcggcttcatagcatatggaattggaacgtgcaccgaatcgatgccaccccagttttcctaacgagtggaaaggaggttgacaatctttgggacaaacttgtggcaggaccaagcaccatgattgtgaaccagtttctttgtgacaaaaattatgcatctcccattataccatcagaatcaatcaagatggagccaatctctgtcccggccctggctgttggcgccactcgatagaggcctgtcaggtcatcaaaatcaccatcaatcacactagtgctattatgccaatgggcgcttttgccacgtggcagggt

SEQ ID NO: 155 - protein, 327 aa, Populus tremuloides
MTMRLSLTAYKQVQPRGNFQGGLNMKPFFRRKDKVVFVVGPTGTGKSRLAIDLATRFPAEVVNCDKMQVYKGLDIVTNKVTEEECRGVPHHLLGIADPNANFTSDDFRHHASLVVESIVTRDRLPIIAGGSNSYIEALANDDPEFRLRYECCFLWVDVSLPILYSFVSERVDRMVEAGLIDEVRDMFDPNKFDDYSQGIKRAIGVPELDHFLRNEAIVDAKTRRKLLDEAIDKIKENTCMLASRQLQKIHRLHSIWNWNVHRIDATPVFLTSGKEVDNLWDKLVAGPSTMIVNQFLCDKNYASPIIPSESIKMEPISVPALAVGATR

SEQ ID NO: 156 - DNA, 1094 bp, Populus tremuloides
gtcaacgacaacgtcccagcacattcaacaatgaccatgaggctttctttgtctgcctacaaacaagtacagcctcgtgtgaatttccaaggggggctcaacatgaaacctttctttcgtcgaaaagataaggttgtgttcgttcttggaccgactggcactggcaaatcaaggctggctattgacctagcaacccacttcccagccgaggttgtcaattgtgacaaaatgcaagtttataagggcctagatatagtcacaaacaaggtgacggaagaggagtgtcgaggcgtgccccatcatttacttggcatagcagaccctaatgcagatttcacttccgatgacttcaggcaccacgcatcacttgttgtcgaatcaatcgtcacacgtgatcggctgccgatcattgccggcggatccaattcgtacgtggaggctttagcaaatgatgatcctgagtttcgattaaggtatgaatgttgctttctttgggtggatgtgtcactacctctactccactcattcgtatcagatcgggttgatcgaatggtaagagcaggcttgattgatgaggtgagagatgtgtttgatccaacaaaatttgatgattattcacaaggaatcaagcgggcaattggggttcctgaattagatcaatttctacgaaacgagacgattgtggatgctaaaacacgtagaaagcttcttgatgaggccattgaaaaaatcaaagaaaatacttgtatgctagctcgtcgacaattacaaaaaatccgtcgacttcatagcatatggaattggaaaatgcaccggatcgatgccacaccagttttcctagcaagtggaaaggaggctgacaatctttgggaccaaattgtggcaggaccaagcaccatgattgtgaaccaatttctttgtgaagaaaatcatgtatcccccattgtaccatcagagtcgatcaatatggtgccaatttctgtcccggctatggccgccgtggctagtcgatagaggtaaaggattcttggttaataccaaaattcatctacaaatcattaccatcatcataatcaccagctgtgattataaat

SEQ ID NO: 157 - protein, 327 aa, Populus tremuloides
MTMRLSLSAYKQVQPRVNFQGGLNMKPFFRRKDKVVFVLGPTGTGKSRLAIDLATHFPAEVVNCDKMQVYKGLDIVTNKVTEEECRGVPHHLLGIADPNADFTSDDFRHHASLVVESIVTRDRLPIIAGGSNSYVEALANDDPEFRLRYECCFLWVDVSLPLLHSFVSDRVDRMVRAGLIDEVRDVFDPTKFDDYSQGIKRAIGVPELDQFLRNETIVDAKTRRKLLDEAIEKIKENTCMLARRQLQKIRRLHSIWNWKMHRIDATPVFLASGKEADNLWDQIVAGPSTMIVNQFLCEENHVSPIVPSESINMVPISVPAMAAVASR

SEQ ID NO: 158 - DNA, 1046 bp, Populus tremuloides
tgtaagtccctgtgcccacaaacaagtcggatgcttgatatccctcctggtatgctcaaaatggacatgctaagtcccagaagccggcaaaaggagaaggttgtgatagtaatggggcctactggaactggcaagtctcggctctctatcgaacttgcaacccagttccctgcagaaatcataaactccgacaaaatgcaggtttacaaaggacttgacatcgtcactaacaaagttgctgaggaagagaaatctggtgtccctcaccatttgttaggaatagcaaatcctactgtggactttacagcaacaaattactgtcacacggcttccttggcggtcgaatcaatttcgactcgaggattgctcccgatcattgttggaggttccaattcatacattgaggccttgatggatgatgaggattttaggttacggttgaactatgattgttgcttcctttgggtagatgtatcaatgcctgtgctacataaatttgtttcgaggcgagtcgagcagatggttagtgtggggatgatcgatgaggtcagaaacattttcgatccctacgctgattattctacggggatcaggaggtcaattggagttcctgaattcgacaagtactttagagctgaagcatttttggatgaagaaaaccgtgccagactacttcatgaagcaatatgtgatgtcaaaaagaatacatgtaagttagcttgccgtcaatgggaaaagattaatcggcttaggaagatcaaggggtgggacatccatagacttgatgccactgaagtattccaaaagtcgggaaaggaagcagatcatgcctgggaaatgcttgtggccagacccagcactgccattgtgggacaactcctctgtggtgttcctgctgataaggtccccgccatagctagcgtagcaaaaaacatgggctatattcgacaatgccttgtggcatagccgttcaatatggctaattaacgactttagaaagtggtatcatatacaatattatctaagtagagggctatcaaggcagg

SEQ ID NO: 159 - protein, 311 aa, Populus tremuloides
MLDIPPGMLKMDMLSPRSRQKEKVVIVMGPTGTGKSRLSIELATQFPAEIINSDKMQVYKGLDIVTNKVAEEEKSGVPHHLLGIANPTVDFTATNYCHTASLAVESISTRGLLPIIVGGSNSYIEALMDDEDFRLRLNYDCCFLWVDVSMPVLHKFVSRRVEQMVSVGMIDEVRNIFDPYADYSTGIRRSIGVPEFDKYFRAEAFLDEENRARLLHEAICDVKKNTCKLACRQWEKINRLRKIKGWDIHRLDATEVFQKSGKEADHAWEMLVARPSTAIVGQLLCGVPADKVPAIASVAKNMGYIRQCLVA

SEQ ID NO: 160 - DNA, 1112 bp, Populus tremuloides
ttacaccattctcaaataattacacgaattatggaaatgattcctctacaaccaaagcttgcctcaagtatgagaactatgccaatggctgcctctctccccttaagaatggagcgggaaatcaggcaccgcaacaacctccaacagatcactagttcactttattccattgacgacaagaagaagcaaaaagctttgttcgtaatgggaacaactgccactggaaaatcaaaactctccattgatttagccactcattttcaaggtgaaatcatcaattcagacaaaattcaggtttacaagggccttgacatgttgaccaacaaaatttcggaaattgaacgccgaggtgtgcctcaccatttgctaggatttgtggaacctggagaagagtttaccacacaagatttttgcaatcatgtacacaaggccatgaaacatattacaggggatggaagcatccccattatcgccggcggctcgaatagatacatcgaagcactcgtcgaggatccgcttttcaacttcaaggatagttatgatacttgttttctatgggtggatgttgccttgccaatcttatttgatcgcgcagcaaaaagggttgatgagatgcttgatgctggtcttgttgaagaggttcgaggtatgtttattccagggatagatcacaatagcgggatttggcgggctattgggattgcagagatggaaccatattttcaagctgaaatggaaatggctgatgaggtcaccatgaaaatattgcttgaaactggtattaaagaaatgaaagaaaataccaagaagctaatcaataaacaactaacgaaaatcaaatatttggctaacaagaaaggatggaaattccatcggattgatgctacttgtgtgtatgagagaagtgcaaaagttgatgaagatgtttgggacaagaaggttttgagacctagcttggagatagttactaattttctccgggaagacgagaaagcagaagaagtggcagacagttttctagttacaagctagcagctgcatctaatcaattgagatataccgattagttcaattttctatcgcatctttacttctcagcacacatcaaaata

SEQ ID NO: 161 - protein, 333 aa, Populus tremuloides
MEMIPLQPKLASSMRTMPMAASLPLRMEREIRHRNNLQQITSSLYSIDDKKKQKALFVMGTTATGKSKLSIDLATHFQGEIINSDKIQVYKGLDMLTNKISEIERRGVPHHLLGFVEPGEEFTTQDFCNHVHKAMKHITGDGSIPIIAGGSNRYIEALVEDPLFNFKDSYDTCFLWVDVALPILFDRAAKRVDEMLDAGLVEEVRGMFIPGIDHNSGIWRAIGIAEMEPYFQAEMEMADEVTMKILLETGIKEMKENTKKLINKQLTKIKYLANKKGWKFHRIDATCVYERSAKVDEDVWDKKVLRPSLEIVTNFLREDEKAEEVADSFLVTS

SEQ ID NO: 162 - DNA, 1325 bp, Populus tremuloides
ggcagtacaaagcaaaaagctttgttcgtaatgggaacaactgccactggaaaatcaaaactctccatcgatttagccactcattttcaaggtgagatcatcaactcggacaaaattcaggtttacaagggccttgacatattgaccaacaaagtttcggaagatgaaagccgaggtgtgcctcaccacttgctaggatttgtggaacctggggaagagtttaccacacaagatttttgcaaccatgtacatatggccatgagacatattatagggaatggaaacatccccattattgccggcggctcaaatagatacatcgaagcactcgtcgaggatccactgttcaaggataattacgatacttgttttctatgggtggatgttgccttgccaattttatttgttcgcgcagcaaagagggttgataagatgctcgatgctggtcttgtcgacgaggtccgaggcatgtttattccagggatagatcacaatagcgggatttggcgggctattgggattccagagctggaaccatattttcaagctgaaatggaaatggccgatgaggtgaccagaaaaatgttacttgacactggtatcaaggaaatgaaagaaaataccaagaagctaatcaataaacaactgaggaaaatcaaatatttggcgaatgagaaaggatggaaattacatcggattgatgctacttttgtgtacgagagaagtggaaacgtagatgaagatgtttgggacgacaaggttttgagacctagcctggagatgctcactaactttctccaggaagatgggaaagcagaagaatttgtggatgctagtggtttgcctggtagctttgaatggagagagaaaggagttgtcactgatgtcaagattcagggtgcttgtggatcatgctgggcttttagcaccactggatctgttgaaggagcaaattttattgcaacaaggaagcttctcaaccttagtgaacaacagcttgttgattgtgacagtgtgacagacaagacttcctgtggtgatggttgcggtggagggttcatgaccaatgcctacaggtgtttgatcgaggcaggggcgttacaagaggagactggattgaatgcaatattaatgcaaacttgtattagaggggtctcgtgcccagttattcgcggcaagaaatggctcaaccgtggtgttctacttgttgggaatggtgcaagaggttactccattcttaattaggtctggctacaagccgtactggatcatcaggaactcatggggtgagcattggggagagaagggacatcaccttctttgca

SEQ ID NO: 163 - protein, 404 aa, Populus tremuloides
MGTTATGKSKLSIDLATHFQGEIINSDKIQVYKGLDILTNKVSEDESRGVPHHLLGFVEPGEEFTTQDFCNHVHMAMRHIIGNGNIPIIAGGSNRYIEALVEDPLFKDNYDTCFLWVDVALPILFVRAAKRVDKMLDAGLVDEVRGMFIPGIDHNSGIWRAIGIPELEPYFQAEMEMADEVTRKMLLDTGIKEMKENTKKLINKQLRKIKYLANEKGWKLHRIDATFVYERSGNVDEDVWDDKVLRPSLEMLTNFLQEDGKAEEFVDASGLPGSFEWREKGVVTDVKIQGACGSCWAFSTTGSVEGANFIATRKLLNLSEQQLVDCDSVTDKTSCGDGCGGGFMTNAYRCLIEAGALQEETGLNAILMQTCIRGVSCPVIRGKKWLNRGVLLVGNGARGYSILN

SEQ ID NO: 164 - DNA, 1233 bp, Vitis vinifera
atgccatctctgtcgkaatgtgaygtatctgtgcaggactgcacaaaccaccccaccaaaacgaccgtcacttctattcctatgaaactccccgtccccaccggttatcatccatattgcagcaaagttcaaacgctcccactcataccggcgataaagcccaccttccgaagatccgggtgggctcgcatggattccacggyccgccgtaatcgcmccaagcacaaggtcgtcgttatcatgggagccaccggcaccggaaaatccaaactctccatcgacctcgccacacgcttccccgccgagatcatcaactctgacaaaatacaaatctacagtggccttgacatcaccactaacaagatccaaatgcacgagcgacaaggtgtaccccaccacctgctcggagatttcgactcctcccacgctgagataaccccttcccagttccgctcggtggctgccgctgctatctcagacatctcttctcgccgcaaactgccagtcctcgctggtgggtccaattcctttattcacgcactcctcgtcgaccggtttgactccgagtctgaccccttyaatggttcggactcggtctccaccgaattacgttaccgctgttgtttcctatgggttgacgtttcatttgctgttctctccgactacttgtcgaagcgagtcgatgaaatgcttggctcagggatgcttgaagagttagctaagttctacgacccggatgaagacgagtctagacccaaaactgggttgagaaaagcgataggagtccccgagttcgacaggcatttccgaaagtaccctcccgtcgaccaaggaataatcgctggaaatcccaagaagaagaaggatgatccagaaatggaaagttttgaagaggcagtgaaggccatcaaggacaacacgtgtcatctagcgaagaagcagatagagaagatcctacggatgaggggagccgggtgggacctcaagagactggacgccacagaggcgttcagggtgctgctgtcgtcagattccggcaagaagtcgtcagaaatatgggagaagcaggtagtggaaccgagcgtgaagtttgtgaggcgcttcttagaggagtaggttgttcagctttttctacccgtcctgttttcctatgatccaaaattagttacctaaattactttcatttccccctttttttggatttactctttccctctctatttgaaaaaaaaa

SEQ ID NO: 165 - protein, 371 aa, Vitis vinifera
  misc_feature (6)..(6): Xaa can be any naturally occurring amino acid
  misc_feature (68)..(68): Xaa can be any naturally occurring amino acid
  misc_feature (73)..(73): Xaa can be any naturally occurring amino acid
MPSLSXCDVSVQDCTNHPTKTTVTSIPMKLPVPTGYHPYCSKVQTLPLIPAIKPTFRRSGWARMDSTXRRNRXKHKVVVIMGATGTGKSKLSIDLATRFPAEIINSDKIQIYSGLDITTNKIQMHERQGVPHHLLGDFDSSHAEITPSQFRSVAAAAISDISSRRKLPVLAGGSNSFIHALLVDRFDSESDPFNGSDSVSTELRYRCCFLWVDVSFAVLSDYLSKRVDEMLGSGMLEELAKFYDPDEDESRPKTGLRKAIGVPEFDRHFRKYPPVDQGIIAGNPKKKKDDPEMESFEEAVKAIKDNTCHLAKKQIEKILRMRGAGWDLKRLDATEAFRVLLSSDSGKKSSEIWEKQVVEPSVKFVRRFLEE

SEQ ID NO: 166 - DNA, 1167 bp, Zea mays
atgaccaccctcctcgccaataggatcactacgctcgtgcgcgcccctcctcctcccatggccgccgccgccgtcgcgggagcgcggaggccattgcaccggaccttggcgcacccgccaccgcccgaggaggacgagcatcagcagcagcgcgcgtgccgcagcaggggatcctcgtcctcctgctcggcttcctcgtcatcgacgcccgcccggccccggggcacggggatggtggtgatcgtcggcgccacgggcaccgggaagaccaagctgtccatcgacgccgcggaggcggtcggcggggaggtggtgaacgcggataagatccagctctacgccgggctggacgtgaccacgaacaaggtggcccccgcggaccgccgcggcgtgccgcaccacctcctcggcgccatccgccccgaggccggcgagctcccgccctccacgttccgctccctcgccgccgccacggccgcctcgatcgccgcgcgcggccgcctgccggtcgtcgcgggcggctccaactccctcatccacgcgctcctcgccgaccgcctcgacgccggcgccgccgaccccttctccgctccaccgcagccggcgccgccgcggtggggccgccggcccgcgctccgatccccgtgctgtctcctctgggtccacgtcgacgccgcgctcctcgcggagtacctggaccggcgcgtggacgacatggtgcgcggcggcatggtggaggagctgcgggagtacttcgccgcgaccaccgccgccgagcgcgccgcgcacgccgcggggctgggcagggccatcggcgtgcccgagctgggcgcctgcttcgcggggcgcgccagcttccgcgccgcgatcgacgacatcaaggccaacacgcgggacctggcggccgcgcaggtgcgcaagatccgacgcatggccgatgcctggggctggcccatccagcggctcgacgcgtcggccacagtccgcgcgcgcctccgcggcgcggggcccgacgcggagtcggcgtgctgggagcgcgacgtgcgcgcgcccgggctcgccgccatccggagcttccttctagagctggacggcggcagcgtcgtcgacggcgctgtggtggaggaggtggagccgcgggtgcgatgctgcgacgtggtggggtga

SEQ ID NO: 167 - protein, 388 aa, Zea mays
MTTLLANRITTLVRAPPPPMAAAAVAGARRPLHRTLAHPPPPEEDEHQQQRACRSRGSSSSCSASSSSTPARPRGTGMVVIVGATGTGKTKLSIDAAEAVGGEVVNADKIQLYAGLDVTTNKVAPADRRGVPHHLLGAIRPEAGELPPSTFRSLAAATAASIAARGRLPVVAGGSNSLIHALLADRLDAGAADPFSAPPQPAPPRWGRRPALRSPCCLLWVHVDAALLAEYLDRRVDDMVRGGMVEELREYFAATTAAERAAHAAGLGRAIGVPELGACFAGRASFRAAIDDIKANTRDLAAAQVRKIRRMADAWGWPIQRLDASATVRARLRGAGPDAESACWERDVRAPGLAAIRSFLLELDGGSVVDGAVVEEVEPRVRCCDVVG

SEQ ID NO: 168 - DNA, 753 bp, Oryza sativa
atgaaggtgcagtgcgacgtgtgcgcggccgaggccgcctcggtcttctgctgcgccgacgaggccgcgctgtgcgacgcgtgcgaccgccgcgtccacagcgcgaacaagctcgccgggaagcaccgccgattctccctcctccaaccgttggcgtcgtcgtcgtccgcccagaagccaccgctctgcgacatctgtcaggagaagagggggttcttgttctgcaaggaggacagggcgatcctgtgccgggagtgcgacgtcacggtgcacaccacgagcgagctgacgaggcggcacggccggttcctcctcaccggcgtgcgcctctcgtcggcgccgatggactcccccgcgccgtcggaggaagaggaggaggaagcaggggaggactacagctgcagccccagcagcgtcgccggcaccgccgcggggagcgcgagcgacgggagcagcatctccgagtacctcaccaagacgctgcccggttggcacgtcgaggacttcctcgtcgacgaggccaccgccgcctcctcctcctcagacgggctatttcagggtgggctgctggctcagatcggtggggtgccggacggttacgcggcgtgggccggccgggagcagctgcacagtggcgtcgctgtcgccgccgacgagcgggccagccgcgagcggtgggtgccgcagatgaacgcggagtggggcgccggcagcaagcgacccagggcgtcgcctccctgcttgtactggtga

SEQ ID NO: 169 - protein, 250 aa, Oryza sativa
MKVQCDVCAAEAASVFCCADEAALCDACDRRVHSANKLAGKHRRFSLLQPLASSSSAQKPPLCDICQEKRGFLFCKEDRAILCRECDVTVHTTSELTRRHGRFLLTGVRLSSAPMDSPAPSEEEEEEAGEDYSCSPSSVAGTAAGSASDGSSISEYLTKTLPGWHVEDFLVDEATAASSSSDGLFQGGLLAQIGGVPDGYAAWAGREQLHSGVAVAADERASRERWVPQMNAEWGAGSKRPRASPPCLYW

SEQ ID NO: 170 - DNA, 1074 bp, Oryza sativa
atgaaggtgctgtgctccgcgtgcgaggcggcggaggcgcgggtgctctgctgcgccgacgacgccgccctctgcgcgcgctgcgacctccacgtccacgccgccaaccgcctcgccggcaagcaccaccgcctccccctcctctcctcctcctcttcttcctcctctccctcccccccgacctgcgacatctgccaggacgcccacgcctacttcttctgcgtcgaggaccgcgccctcctctgccgcgcctgcgacgtcgccgtccacaccgccaacgccctcgtctccgcccaccgccgcttcctcctcaccggcgtccacgtcggccttgacgccgccgccgacgacgacgacaaacaccccccacaccccttgtcgtcgtcgctgccgcgcaacacggcaccgcccccgcagccgccgccgaagcgcagcccctcgccgatctacagcgatgacgacgtcatcgactgggccaccggtggccacgacatcggcatcaccggcaacctgcccgactggtcgctcgtcgacgagcagttcaacacccctgcgctgccgccggtggtgaccaagaccccgccgaagcgggcctcccgtggccccgtcacggccggcaccgccgcggcggtgttcggcaacctcgccggcggatcgccggactggccgctcaacgagttcttcggcttcgccgacttcagctccggcttcggcttcgccgagaacggcacgtccaaggcggacagcggcaagatcgggagcatggacggctcgccgaacggcggcaggtcgtcgtcgtcgtcctcctcctcctccgccgccgccgccggcggcggcggcggcggccaggacttcttcggccaggtgccggaagttcactgggccgtgccggagctcccctcgccgcccacggcgtcagggctccactggcaacgggacccgcgctacggtggcggcgccaccgacgccagcgcggtgttcgtgccggacatctcctcgccggagaaccccttccgttgcttcgccgccgccgccgccggtgaccataccatgaaacgccggaggagatgctaa

SEQ ID NO: 171 - protein, 357 aa, Oryza sativa
MKVLCSACEAAEARVLCCADDAALCARCDLHVHAANRLAGKHHRLPLLSSSSSSSSPSPPTCDICQDAHAYFFCVEDRALLCRACDVAVHTANALVSAHRRFLLTGVHVGLDAAADDDDKHPPHPLSSSLPRNTAPPPQPPPKRSPSPIYSDDDVIDWATGGHDIGITGNLPDWSLVDEQFNTPALPPVVTKTPPKRASRGPVTAGTAAAVFGNLAGGSPDWPLNEFFGFADFSSGFGFAENGTSKADSGKIGSMDGSPNGGRSSSSSSSSSAAAAGGGGGGQDFFGQVPEVHWAVPELPSPPTASGLHWQRDPRYGGGATDASAVFVPDISSPENPFRCFAAAAAGDHTMKRRRRC

SEQ ID NO: 172 - DNA, 816 bp, Oryza sativa
atgaagatccagtgcgacgcgtgcgagagcgcggcggcggcggtggtgtgctgcgcggacgaggcggcgctgtgcgcggcgtgcgacgtggaggtgcacgcggcgaacaagctggccgggaagcaccagcggctgccgctggaggcgctctcggcgaggctcccgcgctgcgacgtgtgccaggagaaggcggcgttcatcttctgcgtggaggaccgcgcgctcttctgccgcgactgcgacgagcccatccacgtccccggcacgctctccggcaaccaccagcgctacctcgccaccggcatccgcgtcggcttcgcctccgcctcgccctgcgacggcggcagcgacgcccatgactccgaccaccacgccccgcccatgggctcctccgagcatcatcaccatcatcagcagccggccccgaccgtcgccgtcgacacgccctcgccgcagttcctgccgcagggctgggccgtcgacgagctcctccagttctccgactacgagaccggcgacaagctgcagaaggagtcgtcgccgccgctcgggttccaggagctggagtggttcgccgacatcgacctgttccacaaccaggcgcccaagggcggcgccgccgccggccggacgacggcggaggtccccgagctcttcgcttcgcaggcggccaacgacgtggcgtactacaggccgccgaccaggaccgccgccgccgccttcaccgcggccaccggcttccgccagagcaagaaggcccgcgtcgagctccccgacgacgaggaggattacctcatcgtccctgatcttggttga

SEQ ID NO: 173 - protein, 271 aa, Oryza sativa
MKIQCDACESAAAAVVCCADEAALCAACDVEVHAANKLAGKHQRLPLEALSARLPRCDVCQEKAAFIFCVEDRALFCRDCDEPIHVPGTLSGNHQRYLATGIRVGFASASPCDGGSDAHDSDHHAPPMGSSEHHHHHQQPAPTVAVDTPSPQFLPQGWAVDELLQFSDYETGDKLQKESSPPLGFQELEWFADIDLFHNQAPKGGAAAGRTTAEVPELFASQAANDVAYYRPPTRTAAAAFTAATGFRQSKKARVELPDDEEDYLIVPDLG

SEQ ID NO: 174 - DNA, 810 bp, Oryza sativa
atgaaggtgcagtgcgacgtgtgcgcggccgaggcggcgtcggtgttctgctgcgccgacgaggccgcgctgtgcgacgcgtgcgaccaccgggtgcaccgggccaacaagctcgccgggaagcaccgccggttctcgctgctcaacccctcggcgtccggccgctcgccgacatcgacgacggcgccgctctgcgacatctgccaggagaagaggggtttcctgttctgcaaggaggaccgggcgatcctgtgccgcgagtgcgacgtgccggtgcacacggcgagcgagctcaccatgcgccacagccggtacctcctcaccggcgtgcggctctcctcggagcctgccgcgtccccggcgccgccgtcggaggaggagaacagcagcagcttctgctgcagcgccgacgacgccgtgccggccccggcggcgcccgccacgagccacggcgggagcagcggcagcagcagcatctccgagtacctcaccacgctgcccgggtggcacgtcgaggacttcctcgtcgacgacgccactgccgaggccgccgccgccgccgccgccacctcttccggcatctccgcgaacgggccgtgtcagggggtaacacggatcggagggctgcaagaatccgccggctaccctgcgtggatggcgcagcagcagctgtgctgcgacggcctcgtcgccggcgacgcgtcgccggctagccgggagcggtgggtgccgcagatgtacgcggatcagcttgccgccggcagcaagagatccaggacgtccactgcttcttcctactcctactggtga

SEQ ID NO: 175 - protein, 269 aa, Oryza sativa
MKVQCDVCAAEAASVFCCADEAALCDACDHRVHRANKLAGKHRRFSLLNPSASGRSPTSTTAPLCDICQEKRGFLFCKEDRAILCRECDVPVHTASELTMRHSRYLLTGVRLSSEPAASPAPPSEEENSSSFCCSADDAVPAPAAPATSHGGSSGSSSISEYLTTLPGWHVEDFLVDDATAEAAAAAAATSSGISANGPCQGVTRIGGLQESAGYPAWMAQQQLCCDGLVAGDASPASRERWVPQMYADQLAAGSKRSRTSTASSYSYW

SEQ ID NO: 176 - DNA, 774 bp, Oryza sativa
atgaggatccagtgcgacgcgtgcgaggccgcggcggccacggtggtgtgctgcgcggacgaggcggcgctgtgcgcgcgctgcgacgtcgagatccacgccgccaacaagctcgccagcaagcaccagcgcctcccgctcgacgccgcgctccccgccgccctcccgcgctgcgacgtctgccaggagaaggcggcgttcatcttctgcgtggaggacagggcgctcttctgccgggactgcgacgagcccatccacgtcccggggacgctctccggcaaccaccagcgctacctcaccaccggcatccgcgtcgggttcagctccgtctgtagcgccaacgccgaccacctcccgccgccagcgcccaaggggaactccaagccgccggcaagcggcatcgctgctgctgctgctcccaagccggccgtgtccgcggcggcgcaggaggtgccgtcgtcaccgttcttgccgccgtcgggctgggccgtcgaggatctcctgcagctctccgactacgagtccagcgacaagaagggctctcctattgggttcaaggatctggagtggctcgatgacatcgacctgttccatgtccagtcgccggccaagggaggcagcacggcggcggaggtgcctgagctcttcgcctcgccgcagccagcgagcaacatggggctctacaaggcgagcggtgcacgccaaagcaagaagccacgggtggagatacccgatgacgacgaggacttcttcatcgttcctgatcttggatga

SEQ ID NO: 177 - protein, 257 aa, Oryza sativa
MRIQCDACEAAAATVVCCADEAALCARCDVEIHAANKLASKHQRLPLDAALPAALPRCDVCQEKAAFIFCVEDRALFCRDCDEPIHVPGTLSGNHQRYLTTGIRVGFSSVCSANADHLPPPAPKGNSKPPASGIAAAAAPKPAVSAAAQEVPSSPFLPPSGWAVEDLLQLSDYESSDKKGSPIGFKDLEWLDDIDLFHVQSPAKGGSTAAEVPELFASPQPASNMGLYKASGARQSKKPRVEIPDDDEDFFIVPDLG

SEQ ID NO: 178 - DNA, 1137 bp, Oryza sativa
atgtcgcctcctcctccaccatattaccaccacctcctcctcctccgctcctcgcccaccaccactggaggaggagctcgggttcttgccgcggcggagctcgcacgcatgaagctactgtgcagcgcgtgcgaggcggcggaggccagcgtcctctgctgcgccgacgaggccgccctgtgcgcgcgctgcgaccgcgacatccacgccgccaaccgcctcgccgggaagcacctccgcctccctctcctctcccccgcctcctcctcctcctcctccgccgccgccctcgcgccgccgccgccgtcgccgcccaagtgcgacatatgccaggagagccacgcgtacttcttctgcctcgaggaccgcgcgctgctgtgccggagctgcgacgtggcggtgcacacggccaacgccttcgtctccgcgcaccgccgtttcctcctcaccggcgtgcaggtcgggcaggagcaggacgagcactcccctgacccgcctgagccgtctcctcctccgccgccgccgccgcctgcatccaagagcgaccacccggcgccgctctacggcgagggcggaggagggttcagctgggacgccgccgactcgccggccgcgggcggcctccccgactggtcggccgtcgtcgaccagttcggctccccgccgccgccgcgccacacggacaccgcgaccgtgacgaccccgccgccgaccaagaggagcccacgcgcgccggcgttcggcggccagggcggcatgatggattggcccctcggcgagttcttcggcggcttcaccgacttcaccggcggctttggcttcggcttcggcgacagtggcacctccaaggctgacagcgggaagctgggagggagcacggacggctcgccgtactaccggtcgtcatcggaagatgaccggaacgccgacgagctcttcgggcaggtaccagagatccagtggtcggtgccggagctcccctcgccgccgacggcctccggcctccactggcaacgccatccagccgccactcacggcggcggcggcggcggacccgacaccaccgccttcgtccccgacatctgctcccccgacagctgcttcccggccaccacctccaaacgccggaggcaataa

SEQ ID NO: 179 - protein, 378 aa, Oryza sativa
MSPPPPPYYHHLLLLRSSPTTTGGGARVLAAAELARMKLLCSACEAAEASVLCCADEAALCARCDRDIHAANRLAGKHLRLPLLSPASSSSSSAAALAPPPPSPPKCDICQESHAYFFCLEDRALLCRSCDVAVHTANAFVSAHRRFLLTGVQVGQEQDEHSPDPPEPSPPPPPPPPASKSDHPAPLYGEGGGGFSWDAADSPAAGGLPDWSAVVDQFGSPPPPRHTDTATVTTPPPTKRSPRAPAFGGQGGMMDWPLGEFFGGFTDFTGGFGFGFGDSGTSKADSGKLGGSTDGSPYYRSSSEDDRNADELFGQVPEIQWSVPELPSPPTASGLHWQRHPAATHGGGGGGPDTTAFVPDICSPDSCFPATTSKRRRQ

SEQ ID NO: 180 - DNA, 1083 bp, Oryza sativa
atgaagatccagtgcaacgcgtgcggcgcggcggaggcgcgggtgctgtgctgcgccgacgaggcagcgctctgcacggcgtgcgacgaggaggtgcacgccgccaacaagctcgccgggaagcaccagcgggtgccgctgctctccgacgacggcggcgccgcgcccgccgccgccgccccggccgtgcccaagtgcgacatctgccaggaggcttctggatacttcttctgcctggaggaccgtgcacttctttgcagagattgtgatgtttctatacacacagtaaactcctttgtttcagtacaccaaagattcctactaacaggtgttcaagttggccttgatcctgctgatccagttccacctgttgctgacaagcatgttaagagtgctggtggttcagtggattcagcaactaaacatttgcaaaggaatcctacagacttatctggtgaaaacagtgcatctttgcccagccaaaatgtaatcaatggtaattattctaggcagagttctgttacaatggccaagacaggacaggtcaattggactatgagcaacaacacaattagatcaatagaccctccacccaagtattcatcagaggaaagtccagcacttctgctagctagccacactagcaccatggcagcgtactccagtcaaatcagtaaggatagtgatcggatctacaacttaccattcacaggtggtaatgggtcagatagtctacatgattggcatgttgatgagttctttagtaactcagaatttggctttgctgagcatggttcttctaagggtgacaacgctaagccagggagtgctggtggatctccgcagtgccgtctggctgaaggcctgtttgtcgaaggacttctaggtcaagtgcctgacaatccatggacagtgcctgaggtcccctcgccaccgacagcctctggtctctattggcaaaataatttgctttgcccttcgtacgacagcaccatgttcgtccctgagatttcctccttggagaactctcagaacaacttcactgtatctgctggtttgaagcgccgaaggaggcagttttga

SEQ ID NO: 181 - protein, 360 aa, Oryza sativa
MKIQCNACGAAEARVLCCADEAALCTACDEEVHAANKLAGKHQRVPLLSDDGGAAPAAAAPAVPKCDICQEASGYFFCLEDRALLCRDCDVSIHTVNSFVSVHQRFLLTGVQVGLDPADPVPPVADKHVKSAGGSVDSATKHLQRNPTDLSGENSASLPSQNVINGNYSRQSSVTMAKTGQVNWTMSNNTIRSIDPPPKYSSEESPALLLASHTSTMAAYSSQISKDSDRIYNLPFTGGNGSDSLHDWHVDEFFSNSEFGFAEHGSSKGDNAKPGSAGGSPQCRLAEGLFVEGLLGQVPDNPWTVPEVPSPPTASGLYWQNNLLCPSYDSTMFVPEISSLENSQNNFTVSAGLKRRRRQF

SEQ ID NO: 182 - DNA, 927 bp, Oryza sativa
atgcgggtgcagtgcgacgtctgcgccgccgagccggccgcggtgctctgctgcgccgacgaggccgcgctctgctccgcctgcgaccgccgcgtccaccgcgccaaccgcctcgccagcaagcaccgccgcctcccgctcgtccacccgtcctcctcctcctccggcgacggtggcgccgccgccgcgccgctgtgcgacgtgtgcagggagaagaggggcctcgtgttctgcgtcgaggaccgcgccatcctgtgcgccgactgcgacgagcccatccactccgccaacgacctcaccgccaagcacacccgcttcctcctcgtcggcgccaagctctcccccgccgcgctcgccgaacagccgctcccgtcctccgactgcagctccgacgacgacgccgccgccgccgccaccgaggaggagtaccactcctccgccgcatccaccggcgccgcagtgagcgcgcctcttgacgcctccagcaacggcgccggtggcggaggaggagtaggagggagcagcatctccgactacctcaccaccatctgccccggctggcgcgtcgaggacctcctccccgacgacgacgccttcgccgccgccgccgcgcaggcggggaaagagaaggacgagcgcgtgccgttcctcgacgccgacctgttcgacgtggtcgccggccggccggagaagaagggcggcgcgtgggcgccgcacgtgccgcacctgccggcgtggtgcctcgacgaggtgccggtcgtcgtcgccgcgtcggcggcgccagcggcgacacctgtaaaggcgaagcagggacacgtgcgggacagccactggagcgacagcgacgcgttcgccgtgccggagttctcgccgccgccgccgccggccaagagggcgcggcccagctcgcagttctggtgcttctga

SEQ ID NO: 183 - protein, 308 aa, Oryza sativa
MRVQCDVCAAEPAAVLCCADEAALCSACDRRVHRANRLASKHRRLPLVHPSSSSSGDGGAAAAPLCDVCREKRGLVFCVEDRAILCADCDEPIHSANDLTAKHTRFLLVGAKLSPAALAEQPLPSSDCSSDDDAAAAATEEEYHSSAASTGAAVSAPLDASSNGAGGGGGVGGSSISDYLTTICPGWRVEDLLPDDDAFAAAAAQAGKEKDERVPFLDADLFDVVAGRPEKKGGAWAPHVPHLPAWCLDEVPVVVAASAAPAATPVKAKQGHVRDSHWSDSDAFAVPEFSPPPPPAKRARPSSQFWCF

SEQ ID NO: 184 - DNA, 636 bp, Oryza sativa
atgcggacgatctgcgacgtgtgcgagagcgcgccggcggtgctcttctgcgtggccgacgaggccgcgctctgccggtcctgcgacgagaaggtgcatatgtgtaacaagcttgctaggcggcacgtgagagttgggcttgcagaccctaataaagttcaacgctgtgatatatgtgaaaatgcccccgccttcttctattgcgagatagatggtacatcactttgccttagttgtgatatgactgttcatgttggtgggaaacgaacccatggaagatacctgctcctaaggcaacgggttgaatttccaggagataaaccaggtcatatggatgatgttgctatgcaacagaaagatcctgaaaaccggacggatcaaaagaaggcccctcactcagtaacaaaggagcaaatggcaaaccatcataatgtgtctgatgatccagcctcagatggcaactgcgatgaccagggtaacatcgattccaaaatgattgatcttaatatgagacccgtccgtactcatggacaaggttcaaactcacagactcagggcgtggatgttagcgtcaacaatcatgattctccaggagtggtgccaacatgtaatttcgaacgagaagccaacaaataa

SEQ ID NO: 185 - protein, 211 aa, Oryza sativa
MRTICDVCESAPAVLFCVADEAALCRSCDEKVHMCNKLARRHVRVGLADPNKVQRCDICENAPAFFYCEIDGTSLCLSCDMTVHVGGKRTHGRYLLLRQRVEFPGDKPGHMDDVAMQQKDPENRTDQKKAPHSVTKEQMANHHNVSDDPASDGNCDDQGNIDSKMIDLNMRPVRTHGQGSNSQTQGVDVSVNNHDSPGVVPTCNFEREANK

SEQ ID NO: 186 - DNA, 633 bp, Oryza sativa
atgaagatcgggtgcgacgcgtgcgagcaggcggaggcggcggtgctgtgctgcgccgacgaggccgcgctctgccgccgctgcgacgccgccgtccactccgccaacaggctcgccggcaagcacacccgcgtcgcgctcctcctcccctcctcctcctccgccgccgccggcgacgacgaccaccaccccacctgcgacatctgccaggagaagacgggctacttcttctgcctcgaggaccgcgccctgctctgccggagctgcgacgtcgccgtccacaccgccactgcgcacgccgccgcccaccgccgcttcctcatcaccggcgtccgcatcggcggcagcgtcgacgccgccgccgcggccgacgtcatcgtcagcccaacaagcagcagcatcgcgccggccggctcggccagcagcaaccacgccggcgccgccggcaacaacaatggccggtcgccggcgccggtgaggttctcagggggagacggcggcgttgagccggagcagcagtggccgtggagtgacgtcttcgccgccgacgacgacgatgacgtcagcgccgccatggagcagtgctactatcatggcatctctgaacctcactcctccagcctcactggatga

SEQ ID NO: 187 - protein, 210 aa, Oryza sativa
MKIGCDACEQAEAAVLCCADEAALCRRCDAAVHSANRLAGKHTRVALLLPSSSSAAAGDDDHHPTCDICQEKTGYFFCLEDRALLCRSCDVAVHTATAHAAAHRRFLITGVRIGGSVDAAAAADVIVSPTSSSIAPAGSASSNHAGAAGNNNGRSPAPVRFSGGDGGVEPEQQWPWSDVFAADDDDDVSAAMEQCYYHGISEPHSSSLTG

SEQ ID NO: 188 - DNA, 597 bp, Saccharum officinarum
atgaagatccagtgcgacgcttgcgagggcgcggctgccacggtggtgtgctgcgccgacgaggccgcgctgtgcgcgcgctgcgacgtcgagatccacgccgccaacaagctcgccagcaagcaccagcgcctcccgctcgaggcgctctcggccaagctcccgcgctgcgacgtctgccaggagaaagcggcgttcatcttctgcgtggaggaccgggcgctcttctgccgggactgcgacgagcccatccacgtcccgggcacgctctccgggaaccaccagcgctacctcgccaccggcatccgcgtcggcttcgcctccgcctccgcctgcagcgacggcgcctgcgacgcccacgactccgaccaccacgccccgcccaaggccaccatcgagccaccgcaggccaccgtctccgccgcggcgcagcaggtgccctcgccgccgcagttcctgccgcagggctgggccgtcgacgagctcctgcagttctccgactacgagtccagcgacaagctgcacaaggagtccccgctcgggttcggagctggagtggttcgccgacatcgacctcttccacgagcaggcgcctaa

SEQ ID NO: 189 - protein, 198 aa, Saccharum officinarum
MKIQCDACEGAAATVVCCADEAALCARCDVEIHAANKLASKHQRLPLEALSAKLPRCDVCQEKAAFIFCVEDRALFCRDCDEPIHVPGTLSGNHQRYLATGIRVGFASASACSDGACDAHDSDHHAPPKATIEPPQATVSAAAQQVPSPPQFLPQGWAVDELLQFSDYESSDKLHKESPLGFGAGVVRRHRPLPRAGA

SEQ ID NO: 190 - DNA, 534 bp, Arabidopsis thaliana
atgaagatacagtgtgatgtgtgtgagaaagctccggcgacggtgatttgttgcgccgacgaagctgctctctgtcctcaatgcgacatcgagattcacgccgctaacaaactcgctagcaagcaccaacgtcttcatcttaattccctctccaccaaattccctcgttgcgatatctgccaagagaaggcagctttcattttctgtgtagaggatagagctctgctttgcagggactgcgatgaatccatccacgtggctaattctcgatctgctaatcaccagaggttcttagccactgggatcaaagtagctctgacctcaactatatgtagtaaagaaattgagaagaatcaacctgagccttccaacaaccaacagaaggctaatcagattcctgctaaatccacaagccagcagcaacaacaaccttcttctgctactccacttccctgggctgttgacgatttctttcacttctctgatattgaatccaccgacaaggtagtgatgagaattgagattcaatgttag

SEQ ID NO: 191 - protein, 177 aa, Arabidopsis thaliana
MKIQCDVCEKAPATVICCADEAALCPQCDIEIHAANKLASKHQRLHLNSLSTKFPRCDICQEKAAFIFCVEDRALLCRDCDESIHVANSRSANHQRFLATGIKVALTSTICSKEIEKNQPEPSNNQQKANQIPAKSTSQQQQQPSSATPLPWAVDDFFHFSDIESTDKVVMRIEIQC

SEQ ID NO: 192 - DNA, 747 bp, Arabidopsis thaliana
atgaagatacagtgtgatgtgtgtgagaaagctccggcgacggtgatttgttgcgccgacgaagctgctctctgtcctcaatgcgacatcgagattcacgccgctaacaaactcgctagcaagcaccaacgtcttcatcttaattccctctccaccaaattccctcgttgcgatatctgccaagagaaggcagctttcattttctgtgtagaggatagagctctgctttgcagggactgcgatgaatccatccacgtggctaattctcgatctgctaatcaccagaggttcttagccactgggatcaaagtagctctgacctcaactatatgtagtaaagaaattgagaagaatcaacctgagccttccaacaaccaacagaaggctaatcagattcctgctaaatccacaagccagcagcaacaacaaccttcttctgctactccacttccctgggctgttgacgatttctttcacttctctgatattgaatccaccgacaagaaaggacagcttgatcttggggcaggggagttggattggttttcagacatgggattcttcggtgatcagattaatgacaaggctcttcctgcagctgaagttcctgagctttctgtttcgcatttaggtcatgttcattcatacaaacctatgaagtcaaatgtttcacacaagaagccgaggtttgagaccagatatgatgatgatgatgaggaacacttcattgtccctgatcttggctaa

SEQ ID NO: 193 - protein, 248 aa, Arabidopsis thaliana
MKIQCDVCEKAPATVICCADEAALCPQCDIEIHAANKLASKHQRLHLNSLSTKFPRCDICQEKAAFIFCVEDRALLCRDCDESIHVANSRSANHQRFLATGIKVALTSTICSKEIEKNQPEPSNNQQKANQIPAKSTSQQQQQPSSATPLPWAVDDFFHFSDIESTDKKGQLDLGAGELDWFSDMGFFGDQINDKALPAAEVPELSVSHLGHVHSYKPMKSNVSHKKPRFETRYDDDDEEHFIVPDLG

SEQ ID NO: 194 - DNA, 996 bp, Arabidopsis thaliana
atgaagatcaggtgcgacgtctgcgataaagaagaagcgtcggtgttttgcacggccgacgaagcatctctctgcggcggctgcgaccaccaagtccaccacgctaacaaactcgcctctaaacatctccgtttctctctcctttatccttcttcttccaacacctcctctcctctctgcgacatctgtcaggataaaaaagctctgttgttctgtcaacaagatagagctattttatgcaaagattgcgattcatcgatccacgctgcgaacgaacacacaaagaaacacgataggtttcttcttacaggggttaagctctctgcaacatcgtctgtttacaaacctacttcgaaatcttcttcttcttcttcaagcaaccaagatttctctgtccctggatcatcaatctctaatcctcctcctctcaagaaacctctctcagctcctcctcagagcaacaagatccaacccttttcgaagatcaacggcggtgatgcgtcggtgaatcagtggggatccacaagcacgatttctgagtatttgatggatacgttacctggttggcacgttgaggatttcctcgattcctctcttcctacttatggtttctctaagagtggtgatgatgatggagtgttaccatatatggaaccagaagatgacaacaacactaagagaaacaacaacaacaacaacaacaacaacaacaatacagtgtcacttccatctaagaatttagggatttgggtccctcagattccacaaactcttccttcttcatacccaaatcaatacttttctcaagacaacaacatacagtttgggatgtacaacaaagaaacatcaccagaagtagtgtcttttgctccaatacaaaacatgaaacaacaaggacagaacaacaagagatggtatgatgatggtggcttcactgtcccacagatcactcctcctcctctttcttctaataaaaagtttagatctttctggtaa

SEQ ID NO: 195 - protein, 331 aa, Arabidopsis thaliana
MKIRCDVCDKEEASVFCTADEASLCGGCDHQVHHANKLASKHLRFSLLYPSSSNTSSPLCDICQDKKALLFCQQDRAILCKDCDSSIHAANEHTKKHDRFLLTGVKLSATSSVYKPTSKSSSSSSSNQDFSVPGSSISNPPPLKKPLSAPPQSNKIQPFSKINGGDASVNQWGSTSTISEYLMDTLPGWHVEDFLDSSLPTYGFSKSGDDDGVLPYMEPEDDNNTKRNNNNNNNNNNNTVSLPSKNLGIWVPQIPQTLPSSYPNQYFSQDNNIQFGMYNKETSPEVVSFAPIQNMKQQGQNNKRWYDDGGFTVPQITPPPLSSNKKFRSFW

SEQ ID NO: 196 - DNA, 900 bp, Arabidopsis thaliana
atgaagattcagtgtaacgtttgtgaggcggcggaagcgacggttctatgttgcgccgacgaggctgctctttgttgggcttgcgatgagaaaattcacgccgctaataaactcgccggaaaacatcagagagtccctctctctgcctctgcctcttccatacccaaatgtgacatttgtcaggaagcatctggattcttcttttgtctgcaagatagagctttgctatgtaggaaatgtgatgttgcaatccacactgtgaatcctcatgtttcagctcaccagagatttcttctcactggaatcaaagttggtcttgaatctatagacactggtccttctactaaatcctcacctaccaatgatgataaaaccatggagaccaaaccttttgttcaatctatacctgagcctcaaaagatggccttcgatcatcatcatcaccagcagcagcaggaacagcaggaaggagttataccgggaactaaagtcaatgatcagacatcgacaaagcttcctctcgtaagtagcggatcaactactggaagcattcctcagtggcaaatagaggagattttcgggctaaccgactttgatcagagctatgaatacatggagaataatggatcatctaaggcggatactagtagacgaggagattcagacagttcttcgatgatgagatctgcagaagaagatggagaagataacaataactgcttgggaggtgagacatcatgggcggttccacagattcagtctccacctacagcgtctggtctaaactggcctaagcattttcaccaccactctgtgtttgttccggacataacttcttcaactccttataccggttcatccccgaatcaaagggttgggaaacggcggcgacggttctag

SEQ ID NO: 197 - protein, 299 aa, Arabidopsis thaliana
MKIQCNVCEAAEATVLCCADEAALCWACDEKIHAANKLAGKHQRVPLSASASSIPKCDICQEASGFFFCLQDRALLCRKCDVAIHTVNPHVSAHQRFLLTGIKVGLESIDTGPSTKSSPTNDDKTMETKPFVQSIPEPQKMAFDHHHHQQQQEQQEGVIPGTKVNDQTSTKLPLVSSGSTTGSIPQWQIEEIFGLTDFDQSYEYMENNGSSKADTSRRGDSDSSSMMRSAEEDGEDNNNCLGGETSWAVPQIQSPPTASGLNWPKHFHHHSVFVPDITSSTPYTGSSPNQRVGKRRRRF

SEQ ID NO: 198 - DNA, 717 bp, Arabidopsis thaliana
atgaagatacaatgtgatgtgtgtgagaaagctccggccacgcttatatgttgtgctgatgaagctgctctctgcgctaaatgtgacgttgaggttcatgctgctaataaactcgctagcaaacaccaacgcctttttcttgactctctctcaactaaattccctccctgcgacatctgccttgagaaggcagctttcatattctgtgtagaggatagggctctgctctgcagagattgcgatgaggcgacccatgcgccaaatactcgctctgctaatcaccagaggttcttagccactggaatccgagttgctcttagttccactagttgcaatcaagaagtggaaaagaatcactttgacccatctaatcagcagagtctctctaaaccgccaactcagcaacccgctgctccatctcctttgtgggctaccgatgaattcttcagctactctgatcttgactgcagtaataaggagaaagagcaactcgatctcggggagctggattggcttgcagagatgggtctgtttggtgaccagcctgatcaagaggctctaccggtagccgaagttcccgagctttccttttcacatttggctcatgctcattcctacaacagacctatgaagtccaatgtacccaacaagaagcagaggcttgagtaccggtatgatgatgaagaagagcacttcctagtccccgacctaggctaa

SEQ ID NO: 199 - protein, 238 aa, Arabidopsis thaliana
MKIQCDVCEKAPATLICCADEAALCAKCDVEVHAANKLASKHQRLFLDSLSTKFPPCDICLEKAAFIFCVEDRALLCRDCDEATHAPNTRSANHQRFLATGIRVALSSTSCNQEVEKNHFDPSNQQSLSKPPTQQPAAPSPLWATDEFFSYSDLDCSNKEKEQLDLGELDWLAEMGLFGDQPDQEALPVAEVPELSFSHLAHAHSYNRPMKSNVPNKKQRLEYRYDDEEEHFLVPDLG

SEQ ID NO: 200 - DNA, 489 bp, Arabidopsis thaliana
atgaagatacaatgtgaagtgtgtgaaaaggctgaagcagaagtactttgttgttcagatgaagctgtactatgcaagccatgtgacattaaggttcatgaagctaataaacttttccaaagacatcaccgagtcgccttacaaaaagatgcagcctcagccaccacagcttctggagctcctctatgtgatatctgccaggagagaaaagggtacttcttctgcttagaggatagagcaatgctgtgcaatgattgtgatgaagccattcacacttgcaattctcaccaaagattcttactttctggagtacaagtttctgatcagtctttgactgaaaactccgaatgcagcactagttttagctctgaaacttaccagattcagtcaaaagtgtctctgaatagtcagtactctagtgaggaaactgaagctggaaactcaggtgagatagtacacaagaatccttctgtaatcttaagtccttag

SEQ ID NO: 201 - protein, 162 aa, Arabidopsis thaliana
MKIQCEVCEKAEAEVLCCSDEAVLCKPCDIKVHEANKLFQRHHRVALQKDAASATTASGAPLCDICQERKGYFFCLEDRAMLCNDCDEAIHTCNSHQRFLLSGVQVSDQSLTENSECSTSFSSETYQIQSKVSLNSQYSSEETEAGNSGEIVHKNPSVILSP

SEQ ID NO: 202 - DNA, 729 bp, Arabidopsis thaliana
atgaagatttggtgtgctgtttgtgataaagaagaagcttcggtgttttgttgtgcggatgaagcagctctttgtaatggttgcgatcgccatgttcatttcgccaataaactagccgggaaacatctccggttctctctcacttctcctactttcaaagatgctcctctttgtgatatttgcggggagaggcgtgcattattattttgccaagaagacagagcaatactatgcagagaatgtgacattccaatacatcaagctaatgagcacactaagaaacacaatagattcctccttaccggcgttaagatctctgcctccccgtcagcctacccaagagcctccaattccaactctgctgctgcatttggtcgagccaaaacccgaccaaaatcagtatcgagcgaggtcccgagctcggcctccaatgaggtatttacgagctcttcttcgacgaccacgagcaattgctattatgggatagaagaaaactaccatcacgtgagcgattcggggtcgggatcgggttgtacaggtagtatatccgagtatttgatggagacattaccgggttggagagtggaggatttgcttgaacacccttcttgtgtctcctatgaggataacattattactaataacaataacagtgagtcttatagggtttatgatggttcttcacaattccatcatcaagggttttgggatcacaaacccttctcttga

SEQ ID NO: 203 - protein, 242 aa, Arabidopsis thaliana
MKIWCAVCDKEEASVFCCADEAALCNGCDRHVHFANKLAGKHLRFSLTSPTFKDAPLCDICGERRALLFCQEDRAILCRECDIPIHQANEHTKKHNRFLLTGVKISASPSAYPRASNSNSAAAFGRAKTRPKSVSSEVPSSASNEVFTSSSSTTTSNCYYGIEENYHHVSDSGSGSGCTGSISEYLMETLPGWRVEDLLEHPSCVSYEDNIITNNNNSESYRVYDGSSQFHHQGFWDHKPFS

SEQ ID NO: 204 - DNA, 700 bp, Medicago truncatula
atgaagatccagtgtgatgcatgtcacaaacaagaggcctccttgttttgccctgcagatgaagcagctctctgcaatcaatgtgatcgcaatatccactatgccaacaaggtctctgctaaacacaaacgcttcactcttcaccaccccacttccaaagacacccctctctgtgatatctgcaaggagaggcgtgcatatctattttgcaaagaagacagagcaatactttgcagggaatgtgacattcctatccatgaaatcaacaaacttaccaagcaacacaacaggtttcttctcacaggcgtaaagatcggtgcttcttcttcttgttcaaatccaacaatttccaatggctcagaactaagaacctcaagtccaagaccaagttcattttcaagtgaaaataatagttgttctcaaagttcattcaaagagaacatggtttgtgacacagtttcaaccagtagcatttccgaatacttgattgaaacgattcctggttactgcatggaggacctttttgatgcttcttttgcacctaataacgttttctgtaataaggattattatgaacagaaccaagatcttcaagttataaacatgtctgactgggtaccacaatctcaagttagattccctcagcttagtgctaattcgaatgttcccaattgattctttagatggggttatgaaaatg

SEQ ID NO: 205 - protein, 224 aa, Medicago truncatula
MKIQCDACHKQEASLFCPADEAALCNQCDRNIHYANKVSAKHKRFTLHHPTSKDTPLCDICKERRAYLFCKEDRAILCRECDIPIHEINKLTKQHNRFLLTGVKIGASSSCSNPTISNGSELRTSSPRPSSFSSENNSCSQSSFKENMVCDTVSTSSISEYLIETIPGYCMEDLFDASFAPNNVFCNKDYYEQNQDLQVINMSDWVPQSQVRFPQLSANSNVPN

SEQ ID NO: 206 - DNA, 702 bp, Lycopersicon esculentum
atgaagatacagtgtgatgtgtgtgagaaagctcaagctactgtgatttgctgtgctgatgaggctgctctgtgtgcaaaatgtgatattgaagttcatgctgctaataaattagcaagcaagcaccaaaggcttcatcttcagtgcctatctaacaagcttcctccttgtgatatttgccaagataaagcagccttcatcttctgtgttgaggatagagctctcttttgcaaggactgtgacgaagcaattcattcagccagcagcctcgctaagaaccaccaacgcttcttagccactggaatccgtgtagccttgagctcaagctgtaataaggaatcagtaaaaaaccaactgcagccacaaccacctcagcagaattcccaacaagttggcttgaaaatgcctccacagcagttgtcctgtataacatcaccatcttggcctgtcgatgatttactaggatttccagattatgagtcgagtgacaagaaggatctacttgagcttggtgaatttgagtggttagggggcattgatctctttggtgaacaaacagcagctgaagtgcccgagctatcagtacctcagtcgagcaatacaaatatttacaggacaaccaaatatcaaatgccttacaagaagtccagaattgaaatcccagatgatgatgagtattttactgtccccgatcttggttga

SEQ ID NO: 207 - protein, 233 aa, Lycopersicon esculentum
MKIQCDVCEKAQATVICCADEAALCAKCDIEVHAANKLASKHQRLHLQCLSNKLPPCDICQDKAAFIFCVEDRALFCKDCDEAIHSASSLAKNHQRFLATGIRVALSSSCNKESVKNQLQPQPPQQNSQQVGLKMPPQQLSCITSPSWPVDDLLGFPDYESSDKKDLLELGEFEWLGGIDLFGEQTAAEVPELSVPQSSNTNIYRTTKYQMPYKKSRIEIPDDDEYFTVPDLG

SEQ ID NO: 208 - DNA, 702 bp, Solanum tuberosum
atgaagatccagtgtgatgtgtgtgagaaagctcaagctactgtgatttgctgtgctgatgaggctgctttgtgtgcaaaatgtgatattgaagttcatgctgctaataaattagcaagtaagcatcaaaggcttcatcttcagtgcctgtctaacaagcttcctccttgtgatatttgccaagataaagcagccttcatcttctgtgttgaggatagagctctcttttgcaaggactgtgacgaagcaattcattcagccagcagcctcgctaagaaccaccaacgcttcttagccactggaatccgtgtagccttgagctcaagctgcaataaggaagcagtaaaaaaccaactggagccacaaccacctcagcagaattcccaacaagttggcttgaaaatgcctccacagcaattgtccggtatcacatcaccatcttggcctgttgatgatttactaggatttccagattatgaatcgagtgacaagaaggatctacttgagcttggtgaatttgagtggttaggaggtattgatctctttggtgaacaaacagcagctgaagtacccgagctatcagtacctcagtcaagcaacacaaatatttaccggacaaccaaatatcaaatgccttacaagaagcccagaattgaaatcccagatgatgatgagtattttaccgtcccagatcttggttga

SEQ ID NO: 209 - protein, 233 aa, Solanum tuberosum
MKIQCDVCEKAQATVICCADEAALCAKCDIEVHAANKLASKHQRLHLQCLSNKLPPCDICQDKAAFIFCVEDRALFCKDCDEAIHSASSLAKNHQRFLATGIRVALSSSCNKEAVKNQLEPQPPQQNSQQVGLKMPPQQLSGITSPSWPVDDLLGFPDYESSDKKDLLELGEFEWLGGIDLFGEQTAAEVPELSVPQSSNTNIYRTTKYQMPYKKPRIEIPDDDEYFTVPDLG

SEQ ID NO: 210 - DNA, 933 bp, Populus trichocarpa
atgaagatccagtgcgatgtgtgtaacaaagaagaggcatcggtgttttgcaccgctgacgaggcagctctttgcgacacctgtgaccaccgtgttcaccatgccaacaagcttgcttcaaagcaccaacgtttttcccttctccatccttcctcaaaaaacttccccatctgtgatatctgccaggagaaacgggctttcttgttctgtcaacaagacagggcgattttatgtagagagtgtgatggtccaatacacacagcaaacgagcatacccagaagcacaacaggtttcttctcacaggagtcaagctctctgctacatctgctgtttatatatcttcttcctctgtcaccaacagtggtggtgatctcgttcctgattcaaagtctcaacagcagcagcagcagcagcaatcaatcaagaaacctgtgtttgatgctccagtgaattccaatccacctacagttcccagtaccttatctacaaacacagaagtaaacaagggtggggataatttggtaacaaatgaagggtttggttcaacaacaagtagtactatatcagagtacttgatggagactcttcctggctggcatgttgaagactttcttgattcctctactactccctttggtttctgtaagattgatgatggtctattgccgtttatggatgctcatgatcttgagagcaacatgagttctttctcatcagaaagtttggggctttgggtccctcaagcaccatctactccatacacatctcaacagtattattatccacagttggtagggcaaagtgggttcaaggagataaaagagaccacaaacatgaaagctaacagaaggttggcagatgatgtcttcactgttccacagatcagcctcccggccaatataagctctaagagatctaggcccttatggtag

SEQ ID NO: 211 - protein, 310 aa, Populus trichocarpa
MKIQCDVCNKEEASVFCTADEAALCDTCDHRVHHANKLASKHQRFSLLHPSSKNFPICDICQEKRAFLFCQQDRAILCRECDGPIHTANEHTQKHNRFLLTGVKLSATSAVYISSSSVTNSGGDLVPDSKSQQQQQQQQSIKKPVFDAPVNSNPPTVPSTLSTNTEVNKGGDNLVTNEGFGSTTSSTISEYLMETLPGWHVEDFLDSSTTPFGFCKIDDGLLPFMDAHDLESNMSSFSSESLGLWVPQAPSTPYTSQQYYYPQLVGQSGFKEIKETTNMKANRRLADDVFTVPQISLPANISSKRSRPLW

SEQ ID NO: 212 - DNA, 618 bp, Vitis vinifera
atgaagataccgtgtgatatatgtgggaatgtggaggctgaggttctatgtagtgctgatgaggcagtactctgttggggatgcgatgaaagggtgcacacagctaacaagctgtcccagaagcatcaacgtgtccctcttctcaaacacccaccctccacttcmtcttctcagctgcctccttgtgatatctgccaggagaaaagcgggtattttttctgcctggaggacagggcattactctgcaagaactgtgatgtttcaactcattcaacaaactcttacgtgtcgtcacaccgacgttttgtcatatcaggaatcaaagttgctcttcaatccgtaactaacaactacagaactggctgcaacagcagaacctaccctctcgatatgccaaactcaaatagttcttcagtcaacttcccaatggatagggagaagaagccagaaatgaccacagaagttgcatccacatcctcagacatggtagccatgttctcaggtgaaatccatttggcaactggacctgaatggacattagatgaaatccttgggagcaatgattttgactattatgagttttcggacatggggcaatccaggattagcagccaatga

SEQ ID NO: 213 - protein, 205 aa, Vitis vinifera
MKIPCDICGNVEAEVLCSADEAVLCWGCDERVHTANKLSQKHQRVPLLKHPPSTSSSQLPPCDICQEKSGYFFCLEDRALLCKNCDVSTHSTNSYVSSHRRFVISGIKVALQSVTNNYRTGCNSRTYPLDMPNSNSSSVNFPMDREKKPEMTTEVASTSSDMVAMFSGEIHLATGPEWTLDEILGSNDFDYYEFSDMGQSRISSQ

SEQ ID NO: 214 - DNA, 717 bp, Glycine max
atgaaaattcagtgcgatgtgtgtgagaaagccccggcaaccgtgatttgctgcgcagatgaggcagctttgtgtgccaaatgtgacgttgaagttcatgctgcaaacaagcttgcaagcaagcaccagaggcttctccttcaatctgtatctaacaagcttcccagatgtgacatatgtcaagataagccagctttcatattttgtgttgaggacagagcactcttctgtaaagactgtgatgaacctattcatttagccagtagcctttctgcaaaccaccagcgcttccttgctactggtatccgggtggctttgggttctaattgcaccaaaggcaatgaaaaaggtcacgtggaaccatctaaaccaaaagcacaagaagttcctgcgaaaattccttctcagcaagtgcctagcttcacatcctcttgggcagttgatgacttgttggaattaacagactttgaatcaccagacaaagttcagaagcaatcccttgagtttggagaacttgaatggctagcagatgtaggcctttttggtgaacagtttcctcatgaagctttagcggcggctgaagttcctcagcttccaatgactagcagtgttggctcacacaaagcccccaaatccttgttgtcttacaaaaagcctaggattgaagtcctagatgaagatgatgatgagcacttcaccgtaccagatctcggataa

SEQ ID NO: 215 - protein, 238 aa, Glycine max
MKIQCDVCEKAPATVICCADEAALCAKCDVEVHAANKLASKHQRLLLQSVSNKLPRCDICQDKPAFIFCVEDRALFCKDCDEPIHLASSLSANHQRFLATGIRVALGSNCTKGNEKGHVEPSKPKAQEVPAKIPSQQVPSFTSSWAVDDLLELTDFESPDKVQKQSLEFGELEWLADVGLFGEQFPHEALAAAEVPQLPMTSSVGSHKAPKSLLSYKKPRIEVLDEDDDEHFTVPDLG

SEQ ID NO: 216 - DNA, 52 bp, Artificial sequence
  primer 1
ggggacaagtttgtacaaaaaagcaggcttaaacaatgaaggtgcagtgcga

SEQ ID NO: 217 - DNA, 49 bp, Artificial sequence
  primer 2
ggggaccactttgtacaagaaagctgggttcaccagtacaagcagggag

SEQ ID NO: 218 - DNA, 2194 bp, Oryza sativa; identical to SEQ ID NO: 12

SEQ ID NO: 219 - protein, 47 aa, Artificial sequence
  B-box 1 in SEQ ID NO: 2
MKVQCDVCAAEAASVFCCADEAALCDACDRRVHSANKLAGKHRRFSL

SEQ ID NO: 220 - protein, 48 aa, Artificial sequence
  B-box 2 in SEQ ID NO: 2
QKPPLCDICQEKRGFLFCKEDRAILCRECDVTVHTTSELTRRHGRFLL

SEQ ID NO: 221 - protein, 24 aa, Artificial sequence
  consensus sequence of B-box
  UNSURE (2)..(3): Xaa can be any naturally occurring amino acid
  UNSURE (5)..(20): Xaa can be any naturally occurring amino acid
  UNSURE (22)..(23): Xaa can be any naturally occurring amino acid
CXXCXXXXXXXXXXXXXXXXCXXC

SEQ ID NO: 222 - DNA, 1245 bp, Zea mays
cccgtccggtctagctaggactagtaagtagcataccattaccatcctccgcgcggctagctccgactcgctttcatccatacgattgcccggagctcaagccctgagctgagccgccagagcgcgcgcgatcatcgcttgagggaaaagcagagtggagtggccgagatgaaggtgcagtgcgacgtgtgcgcggccgaggcggccgaggtgttctgctgcgccgacgaggcggcgctgtgcgacgcgtgcgaccgccgcgtgcaccgcgccaacaagctcgccggcaagcaccgccgcttctcgctgctcagcccggcgccaccgccgccgccgccgctctgcgacatctgccaggacaagcgggggctcctgttctgcaaggaggaccgcgccatcctgtgccgcgactgcgacgtgtcggtgcacacggccagcgacctgaccatgcgccacgcccggttcctgctcacgggcgtccgcctctccgccgagcccgccgccgcgtgcccggcgccggaggatgaggaggaggaggacgacgagaacagcagcggcagcttctgctgcagcgccggcgacgcagccgcacatcctcctcctcttccgtcgtcggcgcccgccaccagccacgggagcgacagcagcagcatctccgagtacctcaccaagacgctgcccgggtggcacgtcgaggacttcctcattgacgacgcgtccgctggcgacgtcggcgcctgctcggatggcctctatcagggacaaaatggacagatcagtggggtgctgcaagaagcttacctgccgtggacggagcgggagcaggtgcaaactgacgtcgcagacgagcgggccagctgggagcggtgggtgccacagatgcatgcggagttcggcggcggcggcaagcgacctagagcgtcgccttcgcctccctgttcgtactggtgattggtgaaaagttcgccgtcttcagcaagatgatttgtattgggctaattagtagagctactgtaggaacgaccgaaaaatgagccaaaaaagtaacggcctccatcgagctcgttttaaattattctctgcctaaagccaaactttcagaaaggagaacggtattttcctgttcgattaattaggtcgatttcgatcgaactcgttccaaaatcccaattgtttgctacctaaagacagacttcctgaatatagttgagtaacaggggaatttgccgaaggaaaaaaaaaaaa

SEQ ID NO: 223 - protein, 260 aa, Zea mays
MKVQCDVCAAEAAEVFCCADEAALCDACDRRVHRANKLAGKHRRFSLLSPAPPPPPPLCDICQDKRGLLFCKEDRAILCRDCDVSVHTASDLTMRHARFLLTGVRLSAEPAAACPAPEDEEEEDDENSSGSFCCSAGDAAAHPPPLPSSAPATSHGSDSSSISEYLTKTLPGWHVEDFLIDDASAGDVGACSDGLYQGQNGQISGVLQEAYLPWTEREQVQTDVADERASWERWVPQMHAEFGGGGKRPRASPSPPCSYW

SEQ ID NO: 224 - DNA, 1065 bp, Oryza sativa
atggtttcggccttgtttcggacgatcctggtgacgggcggcgccggctacatcggcagccacaccgtcctccagcttctccaactcggcttccgcgttgtcgtcctcgacaacctcgacaacgcctccgagctcgccatcctccgcgtcagggaactcgccggacacaacgccaacaacctcgacttccgcaaggttgacctccgcgacaagcaagcgttggaccaaatcttctcctctcaaaggtttgaggctgtcatccattttgccgggctgaaagctgttggcgagagcgtgcagaagcccctgctttactacgacaacaacctcatcggcaccatcactctcctgcaggtcatggccgcacatggctgcaccaagctggtgttctcatcatccgcaactgtctacgggtggcccaaggaggtgccctgcactgaagaatccccactttgtgcaatgaacccctacggcagaacaaagctggtaatcgaagacatgtgccgggatctgcatgcctcagacccaaactggaagatcatactgctccgatacttcaaccctgttggagctcacccaagcgggtacattggtgaggacccctgcggcatcccaaacaacctcatgcccttcgtccagcaggtcgctgttggcaggaggccggcccttaccgtctatggaaccgactacaacaccaaggatggaactggggttcgtgactatatccatgttgttgatctagcggatggtcatatcgccgcgttaaggaagctctatgaagattctgatagaataggatgtgaggtgtacaatctgggcactggaaaggggacatctgtgctggaaatggttgcagcattcgagaaagcttctggaaagaaaatcccgcttgtatttgctggacgaaggcctggagatgccgagatcgtttacgctcaaactgccaaagctgagaaggaactgaaatggaaggcaaaatacggggtagaggagatgtgcagggacctgtggaattgggcgagcaagaacccctacgggtatggatcgccggacagtagcaactga

SEQ ID NO: 225 - protein, 354 aa, Oryza sativa
MVSALFRTILVTGGAGYIGSHTVLQLLQLGFRVVVLDNLDNASELAILRVRELAGHNANNLDFRKVDLRDKQALDQIFSSQRFEAVIHFAGLKAVGESVQKPLLYYDNNLIGTITLLQVMAAHGCTKLVFSSSATVYGWPKEVPCTEESPLCAMNPYGRTKLVIEDMCRDLHASDPNWKIILLRYFNPVGAHPSGYIGEDPCGIPNNLMPFVQQVAVGRRPALTVYGTDYNTKDGTGVRDYIHVVDLADGHIAALRKLYEDSDRIGCEVYNLGTGKGTSVLEMVAAFEKASGKKIPLVFAGRRPGDAEIVYAQTAKAEKELKWKAKYGVEEMCRDLWNWASKNPYGYGSPDSSN

SEQ ID NO: 226 - DNA, 1176 bp, Oryza sativa
atggacttcggtgattctagacgcaagcctaatgtcgtcgggaagttcaccgtagctgttgcactcacggtcatgtgcatcattgtgttgaaacagtcgcctggttttaccagtacaagtgtgttctctcgccatgaaattggtgtgactcatgtgttggtgactggaggagctggatacattgggtcacatgctactcttcgtctacttagggacaactaccgagttaccattgtggataacctttctagagggaacatgggagctgtcagagtccttcaacgtttgtttccagagcctgggaggcttcagtttatttatgctgatttaggcgatgcgaaagctgttaacaaaatattttcagaaaatgcattcgatgctgttatgcactttgctgccgttgcttacgttggtgagagcacgttggagccactgaggtactaccacaacataacatcaaatacattgacagtgcttgaggcaatggcagcatataatgtaaaaactctgatatactcaagtacttgtgcaacatatggtgaacctgacacaatgcctatcacagaagcaacccctcagaatcctatcaatccatatgggaaggcaaaaaagatggcagaggacatcattttagatttctctaagagatcagaaatggcagtcatgatcttaagatacttcaacgtcattggatcagacccaggggggcggttaggggaagctccacgaccagagctgcgtgagcatggacggatttctggtgcttgctttgatgcagcactgggaatcattccaggtttgaaggttcggggaactgattaccctacagctgatggaacttgcataagggactatattgatgtcacggatctcgttgatgctcatgtgaaagctcttgataaagctcagcctggcaaagttggaatctacaatgttggcacaggacatggtagatcagtgaaggagtttgtagaagcatgtaagagcgcaacaggagctagcatcaaggtttcattccttacccggagaccaggagactatgctgaagtttacagtgacccatccaaaatccatgacgagctgaactggacagcccgttacattgatcttcgcgaaagcctttcaactgcatggaaatggcagaaagcacacccgaatgggtatggatcggcctga

SEQ ID NO: 227 - protein, 391 aa, Oryza sativa
MDFGDSRRKPNVVGKFTVAVALTVMCIIVLKQSPGFTSTSVFSRHEIGVTHVLVTGGAGYIGSHATLRLLRDNYRVTIVDNLSRGNMGAVRVLQRLFPEPGRLQFIYADLGDAKAVNKIFSENAFDAVMHFAAVAYVGESTLEPLRYYHNITSNTLTVLEAMAAYNVKTLIYSSTCATYGEPDTMPITEATPQNPINPYGKAKKMAEDIILDFSKRSEMAVMILRYFNVIGSDPGGRLGEAPRPELREHGRISGACFDAALGIIPGLKVRGTDYPTADGTCIRDYIDVTDLVDAHVKALDKAQPGKVGIYNVGTGHGRSVKEFVEACKSATGASIKVSFLTRRPGDYAEVYSDPSKIHDELNWTARYIDLRESLSTAWKWQKAHPNGYGSA

SEQ ID NO: 228 - DNA, 1065 bp, Oryza sativa
atggtttcggccttgttgcggacgatcctggtgacgggcggcgccggctacatcggcagccacaccgtcctccagcttctccaactcggcttccgcgttgtcgtcctcgacaacctcgacaacgcctccgagctcgccatcctccgcgtcagggaactcgccggacacaacgccaacaacctcgacttccgcaaggttgacctccgcgacaagcaagcgttggaccaaatcttctcctctcaaaggtttgaggctgtcatccattttgccgggctgaaagctgttggcgagagcgtgcagaagcccctgctttactacgacaacaacctcatcggcaccatcactctcctgcaggtcatggccgcacatggctgcaccaagctggtgttctcatcatccgcaactgtctacgggtggcccaaggaggtgccctgcactgaagaatccccactttgtgcaatgaacccctacggcagaacaaagctggtaatcgaagacatgtgccgggatctgcatgcctcagacccaaactggaagatcatactgctccgatacttcaaccctgttggagctcacccaagcgggtacattggtgaggacccctgcggcatcccaaacaacctcatgcccttcgtccagcaggtcgctgttggcaggaggccggcccttaccgtctatggaaccgactacaacaccaaggatggaactggggttcgtgactatatccatgttgttgatctagcggatggtcatatcgccgcgttaaggaagctctatgaagattctgatagaataggatgtgaggtgtacaatctgggcactggaaaggggacatctgtgctggaaatggttgcagcattcgagaaagcttctggaaagaaaatcccgcttgtatttgctggacgaaggcctggagatgccgagatcgtttacgctcaaactgccaaagctgagaaggaactgaaatggaaggcaaaatacggggtagaggagatgtgcagggacctgtggaattgggcgagcaagaacccctacgggtatggatcgccggacagtagcaactga

SEQ ID NO: 229 - protein, 354 aa, Oryza sativa
MVSALLRTILVTGGAGYIGSHTVLQLLQLGFRVVVLDNLDNASELAILRVRELAGHNANNLDFRKVDLRDKQALDQIFSSQRFEAVIHFAGLKAVGESVQKPLLYYDNNLIGTITLLQVMAAHGCTKLVFSSSATVYGWPKEVPCTEESPLCAMNPYGRTKLVIEDMCRDLHASDPNWKIILLRYFNPVGAHPSGYIGEDPCGIPNNLMPFVQQVAVGRRPALTVYGTDYNTKDGTGVRDYIHVVDLADGHIAALRKLYEDSDRIGCEVYNLGTGKGTSVLEMVAAFEKASGKKIPLVFAGRRPGDAEIVYAQTAKAEKELKWKAKYGVEEMCRDLWNWASKNPYGYGSPDSSN

SEQ ID NO: 230 - DNA, 1266 bp, Oryza sativa
atgcttcccaccaacaggaacaggccccagcagaggcctgccagatcttggtatttcatctcagacatggacttctccgatccgaagcgcaagccgcggtacctcagtaagatcctcatggtggcgctcctcaccgccatgtgcgtcgtcatgctcacacagccgccctgccataggaggactcccagtgtgttctccatccatgaacccggagtcacgcatgttctagtgacgggcggcgctggatatatcggttcgcacgctgcgcttcggctgctgaaagattccttcagagtcaccatagtggataatctttcaagaggaaatatgggggcaatcaaggttcttcagaacttgttttcagagcctgggcggttgcagttcatctatgctgatttaggcgatccaaaagctgttaatagaatatttgcagaaaatgcttttgatgctgtcatgcactttgctgctgtcgcttatgttggtgagagcacacttgagcctttgaggtactatcataacatcacctcaaacactttagttgtgctagaggctatggcagcacacaatgtgagaaccctgatctactctagcacatgtgccacctatggagaacccgagaagatgcctatcaccgaaggaactccccagtttccgatcaacccatatggtaaagccaagaagatggcagaggacatcatcttggatttttccaaatccaagaaggcagacatggctgtgatgattctaagatacttcaacgtcattggttctgaccctgaaggaaggcttggcgaggctccaaaacctgaattacgggagcatggccgtatatctggtgcatgctttgatgctgcactggggataattcctggtttgaaggttaaaggtactgactatgaaacacctgacggtacttgtgtaagagattacatcgatgtcactgacctcgttgacgcccatgtgaaggcgctcaacaaggcggaaaggggcaaagttggcatatacaatgttggcacaggcaaaggtaggtcagtgaaagaatttgtcgaagcttgcaagaaggcaacaggagttgacatcaaggtcgactacttccctcgtcgacccggtgactatgccgaagtgtacagcgatcccgcaaagatcaacagcgagctgaactggactgctcaacataccgatctcctggagagcctcagggttgcctggacatggcagaagaagcaccggagcggctacggaccccctcaggccatggttttgtga

SEQ ID NO: 231 - protein, 421 aa, Oryza sativa
MLPTNRNRPQQRPARSWYFISDMDFSDPKRKPRYLSKILMVALLTAMCVVMLTQPPCHRRTPSVFSIHEPGVTHVLVTGGAGYIGSHAALRLLKDSFRVTIVDNLSRGNMGAIKVLQNLFSEPGRLQFIYADLGDPKAVNRIFAENAFDAVMHFAAVAYVGESTLEPLRYYHNITSNTLVVLEAMAAHNVRTLIYSSTCATYGEPEKMPITEGTPQFPINPYGKAKKMAEDIILDFSKSKKADMAVMILRYFNVIGSDPEGRLGEAPKPELREHGRISGACFDAALGIIPGLKVKGTDYETPDGTCVRDYIDVTDLVDAHVKALNKAERGKVGIYNVGTGKGRSVKEFVEACKKATGVDIKVDYFPRRPGDYAEVYSDPAKINSELNWTAQHTDLLESLRVAWTWQKKHRSGYGPPQAMVL

SEQ ID NO: 232 - DNA, 1227 bp, Oryza sativa
atggcggtggagaagacggtgccgggcggggtgaggacggtgctggtgacgggcggggcggggtacatcggcagccacgccgtgctgcagctcctcctcgccggattccgcgccgtcgtcgtcgacaacctcaacaactcctccgagctcgccgtccgccgcgtcgccgccctcgccggcgaccactcccggaacctcgccttccacaaggttgacctccgtgacaagggagcactggaaaaggtttttgcttcaacaagattcgatgctgtagttcactttgctgggctaaaagctgtgggcgaaagtgtgcagaagccattgctttattacgacaacaatgttaatggaacagtaaatcttctggaagttatgtctgcccatggatgtaagaagttggtgttctcatcatcagctgcagtttatggatcaccgaagaactcaccctgcacagaagagtttcctctcactccaaacaatccatatggcaaaacaaagcttgttgttgaagatatttgccgtgatatctaccgtacagatcctgaatggaagattattctacttaggtacttcaatccagttggggctcatcctagcggataccttggggaagatccatgtggcattcccaacaatcttatgccttatgttcagcaagttgctgttggcaggaggccagctctgacaatactaggaaatgattatgcaaccagagatggtaccggggtccgagattacatccatgtggttgaccttgctgatggacatattgcggcattgcagaaactctttgagagctccagcatagggtgtgaagcatacaaccttggaactggtaaaggtacctctgtgctggagatagtcaaggcatttgagaaggcttctgggaagaaaattcctctgattattggcccaagacgccctggtgatgcggagattctattttcattacctgctaaagcagagaaggaactcaactggaaagcgaaatttggcatcgatgaaatgtgtagggatcaatggaactgggctagcaagaacccttatggatacgggtcacttgactccaccaagcagaacggacaccactcgtacggatcaattggctctcccaagcagaatggccactgcacaaatggattttctgaatccactaggcataatggtcacaacggatatggactggtcgactctgccaagcataacggcaacggccacttccactga

SEQ ID NO: 233 - protein, 408 aa, Oryza sativa
MAVEKTVPGGVRTVLVTGGAGYIGSHAVLQLLLAGFRAVVVDNLNNSSELAVRRVAALAGDHSRNLAFHKVDLRDKGALEKVFASTRFDAVVHFAGLKAVGESVQKPLLYYDNNVNGTVNLLEVMSAHGCKKLVFSSSAAVYGSPKNSPCTEEFPLTPNNPYGKTKLVVEDICRDIYRTDPEWKIILLRYFNPVGAHPSGYLGEDPCGIPNNLMPYVQQVAVGRRPALTILGNDYATRDGTGVRDYIHVVDLADGHIAALQKLFESSSIGCEAYNLGTGKGTSVLEIVKAFEKASGKKIPLIIGPRRPGDAEILFSLPAKAEKELNWKAKFGIDEMCRDQWNWASKNPYGYGSLDSTKQNGHHSYGSIGSPKQNGHCTNGFSESTRHNGHNGYGLVDSAKHNGNGHFH

SEQ ID NO: 234 - DNA, 1110 bp, Oryza sativa
atggcggggggcgaggtggtggcggtggcggcggcggcggcggggacgagcaggacggtgctggtgacgggaggggccgggtacatcgggagccacaccgtgctgcagctgctcgccgcggggttccgcgtcgtcgtcgccgacagcctcgggaactcctccgagctcgccgtccgccgcgtcgccgcgctcgccggggacaaggcgcggaacctctccttacacaaggttgatattcgtgataagggtggactggaaaaggttttttcttcgacaagatttgatgctgtcgttcattttgctggtctgaaagctgtgggtgaaagtgtgcagaagccattgctttattatgaccataatgttgctgggacaataattcttctagaagttatggcagcccatggatgtaaaaagttggtgttttcatcgtcagctgcagtttatggatcacctaaaaactcaccctgcacagaagagtttcctctcactccacacaatccatatggcagaaccaagctcatagcagaggagatttgccgtgatatataccattcagattctgaatggagcataattttacttaggtacttcaatcctgttggagctcatcccagtggataccttggtgaagacccatgtggaattcctaacaacctcatgcccttcgtccagcaagttgctgtcgggaggagaccgtcacttacaatatttggaaatgactatgcaacaaaagatgggacaggggtacgtgattatattcatgtagttgatcttgctgaggggcatattgctgcactacggaagctgtttgaaagctcaataggatgtcaagcatacaaccttggaacaggaaagggaacatcagtgttggaaatagttaatgcatttgagaaagtttctggaaagaaaatacctttggttattggtccacgacgccctggtgatgctgagattctcttttcgtcagctgctaaagcagagagagaattcaagtggaaggcaaaatatggcatcgaagaaatgtgcagagaccaatggaactgggcgagcaagaatcctttcgggtacgcctcgcccgactccaccaagcagaatggtcattcacactga

SEQ ID NO: 235 - protein, 369 aa, Oryza sativa
MAGGEVVAVAAAAAGTSRTVLVTGGAGYIGSHTVLQLLAAGFRVVVADSLGNSSELAVRRVAALAGDKARNLSLHKVDIRDKGGLEKVFSSTRFDAVVHFAGLKAVGESVQKPLLYYDHNVAGTIILLEVMAAHGCKKLVFSSSAAVYGSPKNSPCTEEFPLTPHNPYGRTKLIAEEICRDIYHSDSEWSIILLRYFNPVGAHPSGYLGEDPCGIPNNLMPFVQQVAVGRRPSLTIFGNDYATKDGTGVRDYIHVVDLAEGHIAALRKLFESSIGCQAYNLGTGKGTSVLEIVNAFEKVSGKKIPLVIGPRRPGDAEILFSSAAKAEREFKWKAKYGIEEMCRDQWNWASKNPFGYASPDSTKQNGHSH

SEQ ID NO: 236 - DNA, 1497 bp, Oryza sativa
atgccggcggacgcggcggcgaaggggatgaagctggagaggtacgcgagcggcgcgggcgcgatgctgctgctgcggcgggcggcgagcgggaaggtcgtgtcggcgtcgtcgcacctgctgttccgcgccaccgtgctcgccacgatggcgctcgtgttcctcttcacgttccactacccgtcgctgctgtcgcgctccttcacgctctcctccggcgccggcgccggcgaggggggagccgcggcgcacgcctcgcaccggagcttgctcatgtcgtcgtcgtcggcgtcggcgtcggcggcgtcggtgtacgggggcgcggcgtgggagaaggaggtgaggcggagcgcgaagccgaggaaggacggggggatagccgtgctggtgaccggcgcggcggggttcgtcggcacgcactgctcgctggcgctgagggcgcgcggcgacggcgtgctggggctcgacaacttcaacgcctactacgacccggagctgaagcgcgcgcggcagaggctcctcgccggccgcggcgtgctcgtgctcgacgccgacatcaacgacgcgctcctgctcgagaagctgttcgacctggtgccgttcacccacgtgctgcacctcgccgcgcaggccggcgtgcgctacgccatggaggcgccgcagacgtacgtggcgtccaacgtggccgggctcgtgaccgtcctcgaggtcgccgccaagcacgccgacccgcagccggcgatcgtctgggcgtcgtcgtcgtcggtgtacggcctcaacaccgacgcacccttctccgaggagcaccgcaccgaccggccggcgtcgctgtacgcggcgaccaagaaggccggcgaggccatcgcgcacacgtacaaccacatctacggcctctccatcaccggcctccgcttcttcaccgtgtacgggccatggggccgccccgacatggcctacttcttcttcgccaagagcatcgtctccggcgagcccatcacgctgttccgcgccgccgacggcgccgacgcgcgccgcgatttcacctacatcgacgacgtcgtcaagggctgcctcggcgcgctcgacacctccggcaagagcaccggctcctccaagtccggcaagaagtccggcccggcgccgctccgcgtctacaacctcggcaacacctcgccggtgccggtcacccgcatggtcgccatcctcgagaagctcctcggcaagaaggccaacaagcgcatcgtcgccatgcccagcaatggcgacgtgcccttcacccacgccaacgtcacccacgccgcccacgacttcggctaccgccccaccacctccctcgacgccggcctccgccacttcgtcgactggttcgccgactactacaagctcaagctcgacgtccccaagatcgccgccaaggtcgccggcgccggcaagccctcctcctcgtcggcctccaagaagaagaagaaggccgcggcgatgtcggcgtcatcatga

SEQ ID NO: 237 - protein, 498 aa, Oryza sativa
MPADAAAKGMKLERYASGAGAMLLLRRAASGKVVSASSHLLFRATVLATMALVFLFTFHYPSLLSRSFTLSSGAGAGEGGAAAHASHRSLLMSSSSASASAASVYGGAAWEKEVRRSAKPRKDGGIAVLVTGAAGFVGTHCSLALRARGDGVLGLDNFNAYYDPELKRARQRLLAGRGVLVLDADINDALLLEKLFDLVPFTHVLHLAAQAGVRYAMEAPQTYVASNVAGLVTVLEVAAKHADPQPAIVWASSSSVYGLNTDAPFSEEHRTDRPASLYAATKKAGEAIAHTYNHIYGLSITGLRFFTVYGPWGRPDMAYFFFAKSIVSGEPITLFRAADGADARRDFTYIDDVVKGCLGALDTSGKSTGSSKSGKKSGPAPLRVYNLGNTSPVPVTRMVAILEKLLGKKANKRIVAMPSNGDVPFTHANVTHAAHDFGYRPTTSLDAGLRHFVDWFADYYKLKLDVPKIAAKVAGAGKPSSSSASKKKKKAAAMSASS

SEQ ID NO: 238 - DNA, 1122 bp, Oryza sativa
atggtgagcggcggaggagtagcggcggagaacggcgagatggtggggaacggggaggggaggaagggtgcgggggcgagcgtgctggtgacggggggagcggggtacatcgggacgcacacggtgctgcggctgctggagaaggggttcgcggtcaccgtcgtcgacaacttccacaactccgtcccggaggcgctcgaccgcgtccgcctcatcgccggcgccgccctctccgcccgcctcgacttcatcgccggggatctcaagagcaaggacgacatggagaaggtgttcgccgccaagaggtatgacgccgtgatccacttcgccgggctgaaggcggtgggggagagcgtcgcgcacccgcagatgtactacgagaacaacgtcgccggcaccatgaacctctactccgccatgaccaagtacggctgcaagaagatagtgttctcgtcgtcggcgacggtgtacggccagccggagaagaccccctgcgtcgaggattccaagctgagcgctctcaacccatacggcaccaccaagctcgtcctggagaactacttccggcaggtgcaggccgccgacccggagatgagggtgatcctgctcaggtacttcaaccccatcggcgctcaccggagcggcgacatcggggaggaccccaggggcatccccaacaaccttcttccgtacatccagcaggtcgccgtcggccgccgccccgagctcaacgtctacggcgtcgactacccaaccagggacggcaccgcgatcagggattacatacatgtagtggaccttgccgatggccacattgccgcactggagaagctcttcgctactcctgacattggttgtgtggcttacaatctaggaacagggtgtggaacaacggtgctcgaggtggtgaaggcgttcgaggaggcgtccggaaagaaaattcctatcaagatttgccccagaagacctggagattgcactgaggtttacgcttccactgacaaggccaagaaggagctcggatggagtgctcggtttggaatagaggacatgtgcagggaccagtggaattgggccaagaagaatccgtacggatacagcgccaatgctgagcagaattag

SEQ ID NO: 239 - protein, 373 aa, Oryza sativa
MVSGGGVAAENGEMVGNGEGRKGAGASVLVTGGAGYIGTHTVLRLLEKGFAVTVVDNFHNSVPEALDRVRLIAGAALSARLDFIAGDLKSKDDMEKVFAAKRYDAVIHFAGLKAVGESVAHPQMYYENNVAGTMNLYSAMTKYGCKKIVFSSSATVYGQPEKTPCVEDSKLSALNPYGTTKLVLENYFRQVQAADPEMRVILLRYFNPIGAHRSGDIGEDPRGIPNNLLPYIQQVAVGRRPELNVYGVDYPTRDGTAIRDYIHVVDLADGHIAALEKLFATPDIGCVAYNLGTGCGTTVLEVVKAFEEASGKKIPIKICPRRPGDCTEVYASTDKAKKELGWSARFGIEDMCRDQWNWAKKNPYGYSANAEQN

SEQ ID NO: 240 - DNA, 1056 bp, Arabidopsis thaliana
atgggttcttctgtggagcagaacattcttgttactggtggtgctggctttatcgggacgcatactgttgttcaacttctcaaagatggttttaaggtttcgatcatcgataattttgataactctgttatcgaagctgttgatagagttagggagcttgttggtcctgatctctccaagaagctcgacttcaatctgggtgatctaagaaacaaaggggacattgagaaactattctccaagcagagatttgatgctgtgattcattttgcgggtcttaaagctgtgggtgagagtgttgaaaaccctcgccgctactttgacaataacttggttggaacaatcaatctatatgagaccatggcaaagtacaactgcaaaatgatggtgttttcatcttctgccactgtttatggacaacctgaaaagattccatgcatggaagactttgaattaaaggctatgaatccttatggtcgtactaagctctttcttgaagaaatagctagagatattcaaaaggcagaaccggaatggagaattattctgctgaggtacttcaatcctgtaggagcacatgagagtggcagtattggtgaggatccaaaaggcatccccaataacctcatgccttacatccaacaagtggccgttggacgtttaccggaactcaatgtctatggacatgactatcccaccgaggatggtagtgcggtaagagactacatccatgtgatggatttagcagatggccatatcgctgcgctcaggaagctatttgctgatccaaagattggttgtactgcttacaatctagggactggtcaaggaacgtctgtgttagaaatggttgcagcttttgaaaaagcttccggcaagaaaatcccgattaagctctgtccgagaaggtcaggagatgcaacagcagtttatgcttcaacagagaaggctgagaaagaacttggctggaaggcaaaatatggagtggatgagatgtgcagagatcagtggaaatgggcaaacaataatccatggggttaccagaataagctttga

SEQ ID NO: 241 - protein, 351 aa, Arabidopsis thaliana
MGSSVEQNILVTGGAGFIGTHTVVQLLKDGFKVSIIDNFDNSVIEAVDRVRELVGPDLSKKLDFNLGDLRNKGDIEKLFSKQRFDAVIHFAGLKAVGESVENPRRYFDNNLVGTINLYETMAKYNCKMMVFSSSATVYGQPEKIPCMEDFELKAMNPYGRTKLFLEEIARDIQKAEPEWRIILLRYFNPVGAHESGSIGEDPKGIPNNLMPYIQQVAVGRLPELNVYGHDYPTEDGSAVRDYIHVMDLADGHIAALRKLFADPKIGCTAYNLGTGQGTSVLEMVAAFEKASGKKIPIKLCPRRSGDATAVYASTEKAEKELGWKAKYGVDEMCRDQWKWANNNPWGYQNKL

SEQ ID NO: 242 - DNA, 1056 bp, Arabidopsis thaliana
atgggttcttctgtggaacagaacattttggtgactggtggtgctggattcattggaacacatactgttgttcagcttttgaatcagggttttaaggttacgatcattgataatcttgataactctgtcgttgaagctgttcatagggttagggaacttgttggtcctgatctctctaccaagcttgaattcaatctgggtgatctaagaaacaaaggagatattgagaaactcttttccaatcagagatttgatgctgtgattcactttgctggtcttaaagctgtgggagaaagtgttggaaaccctcgtcgttactttgataataacttagttggaactatcaatctatatgagaccatggcaaaatacaactgcaaaatgatggtgttttcgtcgtctgcaacagtttatggtcaacctgaaatagtcccatgtgtggaagactttgagttacaggctatgaatccttatggtcgtactaagctgtttcttgaagagatagctagagacattcacgctgcggaaccagaatggaagataattcttctgaggtacttcaatccggttggagctcacgagagtggaagaattggagaagatccaaagggcataccgaataatctcatgccttatatccaacaagtggcggttggaagattacctgaactcaatgtatttggacatgattatcctaccatggatggtagcgcggttagagactacatccatgtaatggatttagcagatggccatgtggctgcgttaaacaaattgttttcagactcaaagattggctgtactgcttataatcttggcactggtcaaggaacttctgtcttagaaatggtttcttcttttgaaaaagcttctggcaagaaaatacctatcaagctatgtccaagaagagctggagatgcaacagctgtttatgcttcaactcagaaagctgagaaggaacttggctggaaggcaaaatatggagttgatgagatgtgcagagatcaatggaactgggcaaataagaatccatggggtttccagaagaagccttga

SEQ ID NO: 243 - protein, 351 aa, Arabidopsis thaliana
MGSSVEQNILVTGGAGFIGTHTVVQLLNQGFKVTIIDNLDNSVVEAVHRVRELVGPDLSTKLEFNLGDLRNKGDIEKLFSNQRFDAVIHFAGLKAVGESVGNPRRYFDNNLVGTINLYETMAKYNCKMMVFSSSATVYGQPEIVPCVEDFELQAMNPYGRTKLFLEEIARDIHAAEPEWKIILLRYFNPVGAHESGRIGEDPKGIPNNLMPYIQQVAVGRLPELNVFGHDYPTMDGSAVRDYIHVMDLADGHVAALNKLFSDSKIGCTAYNLGTGQGTSVLEMVSSFEKASGKKIPIKLCPRRAGDATAVYASTQKAEKELGWKAKYGVDEMCRDQWNWANKNPWGFQKKP

SEQ ID NO: 244 - DNA, 1047 bp, Arabidopsis thaliana
atggttgggaatattctggtgaccggtggtgctggttacatcggaagtcacacggttcttcagcttcttctcggaggctataacaccgtcgttatagacaacctcgacaattcctctctcgtttcgatccaacgcgtcaaggatctcgccggagatcatggacaaaatctcaccgtccaccaggtggaccttcgcgataaacccgcacttgagaaggttttctccgaaacaaagtttgatgcagtaatgcattttgctggattgaaagcagttggtgagagcgtggcgaaaccacttctgtattataacaataacttgattgcgactattacacttttggaagtaatggctgcacacggatgtaaaaagcttgtattttcttcgtccgctactgtgtatggctggccaaaggaggttccttgtacagaagagtctcccctgtctggaatgagtccttatggacggacaaagctgttcatagaggacatttgccgtgatgtacaacgtggtgatcctgaatggagaatcataatgctgaggtactttaaccctgtgggagctcaccctagcggtcgcattggtgaggatccttgtgggactccaaataatctcatgccttatgtccagcaagtcgttgttgggaggctacctaacctaaaaatttatggaactgactataccactaaagatggcactggtgtacgagactatattcatgttgttgatctagcagatggccatatatgtgcgcttcaaaagctagacgatactgaaataggttgtgaggtatacaacctgggaaccggaaaaggaacaacagtgttggagatggttgatgcatttgagaaagcttctggaatgaaaatcccactggtgaaggttggaaggagaccaggtgatgcagaaaccgtctatgcgtcaacagaaaaagctgaacgcgaactaaactggaaggcaaattttggaatcgaagaaatgtgtagggatcagtggaactgggcaagcaacaatcctttcggttacggttcttcaccaaactcaacataa

SEQ ID NO: 245 - protein, 348 aa, Arabidopsis thaliana
MVGNILVTGGAGYIGSHTVLQLLLGGYNTVVIDNLDNSSLVSIQRVKDLAGDHGQNLTVHQVDLRDKPALEKVFSETKFDAVMHFAGLKAVGESVAKPLLYYNNNLIATITLLEVMAAHGCKKLVFSSSATVYGWPKEVPCTEESPLSGMSPYGRTKLFIEDICRDVQRGDPEWRIIMLRYFNPVGAHPSGRIGEDPCGTPNNLMPYVQQVVVGRLPNLKIYGTDYTTKDGTGVRDYIHVVDLADGHICALQKLDDTEIGCEVYNLGTGKGTTVLEMVDAFEKASGMKIPLVKVGRRPGDAETVYASTEKAERELNWKANFGIEEMCRDQWNWASNNPFGYGSSPNST

SEQ ID NO: 246 - DNA, 1056 bp, Arabidopsis thaliana
atgatggctagaaacgttctagtaagcggtggtgctggatacatcggtagtcacacggtgcttcaacttcttctcggtggttactccgtcgtagttgttgataatctcgataattcctccgccgtctctcttcaacgtgtgaagaaactcgcggctgaacacggagaacgcctctccttccaccaggtggatcttcgagacaggtctgctcttgagaagatattctcagaaacaaagtttgatgcagtgatacattttgctggacttaaagcagttggtgagagtgtagagaagcctttgctttattataataataatcttgttggtactattactcttttggaagttatggctcaacatggctgcaaaaatcttgtgttttcatcatcagcaactgtgtatggctctccaaaagaagttccttgtacagaggagtttccaatttctgctttgaacccatatggacgaacaaagctattcattgaggaaatctgccgcgatgtatacggttctgacccggaatggaagattatattgcttaggtatttcaatcctgttggtgcacatcctagtggtgacattggtgaagaccctcgtggtattccaaacaatctcatgccctttgtacaacaagtggctgttggtaggagacctcatctcactgtctttggaaatgattacaatacaaaagatggaacaggggttcgagattacattcatgttattgatttagctgatggacacatagcggctctacgtaagctagaagattgcaagatcggttgtgaagtgtacaatctcggaacaggaaatggaacatcagttcttgaaatggttgatgcttttgaaaaagcatccggaaagaaaatccctctggtgatcgcgggacgtcgaccgggagatgctgaagttgtatacgcctcgacggaaagagcagaaagtgaattgaattggaaggccaaatatgggattgaggagatgtgtagagatttgtggaactgggctagtaataatccttatggatatgattcctcttctgaagacaactctcattaa

SEQ ID NO: 247 - protein, 351 aa, Arabidopsis thaliana
MMARNVLVSGGAGYIGSHTVLQLLLGGYSVVVVDNLDNSSAVSLQRVKKLAAEHGERLSFHQVDLRDRSALEKIFSETKFDAVIHFAGLKAVGESVEKPLLYYNNNLVGTITLLEVMAQHGCKNLVFSSSATVYGSPKEVPCTEEFPISALNPYGRTKLFIEEICRDVYGSDPEWKIILLRYFNPVGAHPSGDIGEDPRGIPNNLMPFVQQVAVGRRPHLTVFGNDYNTKDGTGVRDYIHVIDLADGHIAALRKLEDCKIGCEVYNLGTGNGTSVLEMVDAFEKASGKKIPLVIAGRRPGDAEVVYASTERAESELNWKAKYGIEEMCRDLWNWASNNPYGYDSSSEDNSH

SEQ ID NO: 248 - DNA, 1053 bp, Arabidopsis thaliana
atggcgaagagtgttttggttaccggcggcgctggctatatcggaagtcatactgttcttcaactgcttgaaggtggttactccgccgtcgttgttgacaattacgacaattcctctgctgcttcgcttcagcgcgtgaagaaactcgccggcgaaaacggaaaccgcctctccttccaccaggtggatctccgagacaggcctgcgcttgagaagatattctcagaaacaaagtttgatgcagtgatacactttgctggacttaaagcagtaggtgagagtgtggagaagcctttgctctattataataataacattgttggcactgttactcttttggaggttatggctcaatacggctgcaaaaatcttgtattttcatcatcagctactgtctatggctggcctaaggaggttccttgcactgaggagtcaccaatttctgccactaacccatatggccgtacaaagctttttatcgaagagatttgccgggatgtacatcgttctgactcggaatggaagatcatattgcttagatacttcaaccctgttggtgcacatcctagtggttacattggtgaagatcctcttggagttcccaacaatctcatgccttatgtccaacaagttgcagttggccggagacctcaccttactgtctttggaaccgactacaagacaaaggatggtacaggggttagagattacattcatgtcatggatttagcagatggacacatagctgctctgcgtaagctagatgatctcaaaatcagttgtgaggtatacaatcttggaacgggtaatggaacatcggtcctagaaatggtcgctgcctttgaaaaagcatccggaaagaaaatccctttggtgatggctggacgacgtcctggagacgctgaagttgtttacgcctcaacggaaaaagcagagcgcgaactaaattggaaggctaagaatgggatagaggagatgtgtagggatctatggaattgggcaagcaataacccctacggctacaattcctcctccaatggctcctcttcataa

SEQ ID NO: 249 - protein, 350 aa, Arabidopsis thaliana
MAKSVLVTGGAGYIGSHTVLQLLEGGYSAVVVDNYDNSSAASLQRVKKLAGENGNRLSFHQVDLRDRPALEKIFSETKFDAVIHFAGLKAVGESVEKPLLYYNNNIVGTVTLLEVMAQYGCKNLVFSSSATVYGWPKEVPCTEESPISATNPYGRTKLFIEEICRDVHRSDSEWKIILLRYFNPVGAHPSGYIGEDPLGVPNNLMPYVQQVAVGRRPHLTVFGTDYKTKDGTGVRDYIHVMDLADGHIAALRKLDDLKISCEVYNLGTGNGTSVLEMVAAFEKASGKKIPLVMAGRRPGDAEVVYASTEKAERELNWKAKNGIEEMCRDLWNWASNNPYGYNSSSNGSSS

SEQ ID NO: 250 - DNA, 1137 bp, Populus tremuloides
atggattatctggattcaagacgaaagagcagatgtgctggaaaaattattgcagctgcgctctgcattacattctcccagcatgagctcggcgtaacgcatgtcttagtgactggaggtgctgggtatattggctctcatgctgcacttcgactcttgaaggattcataccgtgtaactaaagtggacaatctttctcgagggaatctgggtgctgttaaagttctccaagatctatttccggagcctgggcggttacagttcatatacgcagacttgggagatgcaaaagctgtaaacaaaatctttgctgaaaatgcatttgatgctgtgatgcatttcgctgctgttgcatatgttggtgaaagtacaatggaacctctcagatattatcacaacatcacatcaaataccttggtagttttagaagcaatggcagcacataaggtgaagacattgatttattctagcacttgtgcaacttacggcgagcctgttaagatgccgattacagaacaaactcctcagcttccaatcaacccctatggaaaagccaagaaaatggcagaagatatcataattgacttctcaaaaaccactgacatggctgtcatgatcctaagatacttcaatgttattgggtctgatccagaaggaagattaggggaagctccgcaacctgaacttcgtgagcatggccgaatctctggcgcttgttttgatgcagctcgaggaataataccaggactaaaacagagaatcacaattcagtggatagactataaaactgctgatggcacgtgtgtacgggactatatcgatgtcactgacctggtcgatgcccatgtgaaagctcttgcccatgcaaagcctcgaaaagttggcatttacaatgttggaactggaaaaggtagatcagtgaaggagtttgtcgaggcatgtaagaaggcaacaggtgtggacataaaggttgaatacctcaatcgtcggccaggagactatgctgaggtcttcagtgacccttccaaaataaaacaagagctaaactggaaagctcaatatactgaccttaagaagagtttgcagattgcatggaaatggcagaagtcacatttgaatggttacagtcacagttaa

SEQ ID NO: 251 - protein, 378 aa, Populus tremuloides
MDYLDSRRKSRCAGKIIAAALCITFSQHELGVTHVLVTGGAGYIGSHAALRLLKDSYRVTKVDNLSRGNLGAVKVLQDLFPEPGRLQFIYADLGDAKAVNKIFAENAFDAVMHFAAVAYVGESTMEPLRYYHNITSNTLVVLEAMAAHKVKTLIYSSTCATYGEPVKMPITEQTPQLPINPYGKAKKMAEDIIIDFSKTTDMAVMILRYFNVIGSDPEGRLGEAPQPELREHGRISGACFDAARGIIPGLKQRITIQWIDYKTADGTCVRDYIDVTDLVDAHVKALAHAKPRKVGIYNVGTGKGRSVKEFVEACKKATGVDIKVEYLNRRPGDYAEVFSDPSKIKQELNWKAQYTDLKKSLQIAWKWQKSHLNGYSHS

SEQ ID NO: 252 - DNA, 1254 bp, Populus tremuloides
atgctaaactttggcaggaccagagctcagacaaggtccaatagatctatatctcttggaggcatggattattcagatccaaaaaggaaaaacaacgttgtaggaaagattcttttggctgctaccctcacagctttatgtataattatgctaaagcaatctccgaccttttattctccaagcccgttctctttgcatgaagaaggggtgatccatgtcctagtgacaggtggtgctggctacattggttcccatgctgcattgcgacttttgaaggatggttaccgagtaaccatagtggacaacctttctcgaggaaacataggtgcagtcaaggttttacaagaattatttccagagcccgggaggcttcagtttatatatgctgacctgggagatcctaaaactgttaacattatcttctcacaaaatgcatttgatgctgtgatgcattttgcggcagttgcatatgttggggaaagcaccatggaacccctgaagtactatcacaatatcacatcaaataccttggtagttttggaggcaatggctgcaaatgatgtaaagactttgatatattcaagtacatgtgcaacatatggggagcctgaaaagatgccgattactgaagtaactccacaggtacccattaatccatatggaaaagctaagaagatggcagaagatatcatccttgatttttctaaaaactcagacatggcaattatgatattgagatacttcaatgtgattggatcagatccagatggcaggttaggtgaggctcctagacctgaactgcgtgagcatggacgaatttccggtgcttgtttcgatgcagctcgtggtattattgctgggctgaaggttaaaggaacagactataagacgcatgatggaacttgtataagagattatattgacgttactgatcttgttgatgctcatgttaaagcacttgaaaaggcaatgcctggtaaagtaggaatctacaatgttggcactggaaagggtagatcagtcaaggagtttgttaaggcatgtaaaaaggcaactggtgtagatatcaaagttgactatttacctcgccgtcctggtgactacgctgaagtattcagtgacccatcaaaaatttaccgcgagctgaactggacagcgcaatacacggatctccagaagagcttacagactgcatggagatggcaaaaatcacatcaaaatgggtatggatcccctttggtgatggcttcttga

SEQ ID NO: 253 - protein, 417 aa, Populus tremuloides
MLNFGRTRAQTRSNRSISLGGMDYSDPKRKNNVVGKILLAATLTALCIIMLKQSPTFYSPSPFSLHEEGVIHVLVTGGAGYIGSHAALRLLKDGYRVTIVDNLSRGNIGAVKVLQELFPEPGRLQFIYADLGDPKTVNIIFSQNAFDAVMHFAAVAYVGESTMEPLKYYHNITSNTLVVLEAMAANDVKTLIYSSTCATYGEPEKMPITEVTPQVPINPYGKAKKMAEDIILDFSKNSDMAIMILRYFNVIGSDPDGRLGEAPRPELREHGRISGACFDAARGIIAGLKVKGTDYKTHDGTCIRDYIDVTDLVDAHVKALEKAMPGKVGIYNVGTGKGRSVKEFVKACKKATGVDIKVDYLPRRPGDYAEVFSDPSKIYRELNWTAQYTDLQKSLQTAWRWQKSHQNGYGSPLVMAS

SEQ ID NO: 254 - DNA, 1233 bp, Populus tremuloides
atggtgcacaagggctctggtatggatttcctggattcaagaagaaagagcaattctgctggaaaagttattgcagttgcattcttcattgcagtatgcattgtcatgctcaagcaagtgtactcacctagttataccagccccgacatgttctcccaacatgagctaggcgtaacgcatgtgttggtgaccggaggtgctggttacataggttctcacgctgcacttcgactcttgaaggattcataccgagtaactatagtggacaatctctctcgagggaatctcggtgcggttaaagttcttcaagagctatttccagagcctgggagattgcagttcatatatgctgacctaggagatgcaaaagctgtaaacaaaatctttgccgaaaatgcatttgatgctgtgatgcattttgctgctgttgcatatgttggtgaaagtacaatagagccccttagatattatcacaatatcacatcaaataccttggttgtcttggaagcaatggctgcacataatgtgaagacattaatctattcgagcacttgtgcaacgtacggagaacctattaagatgccgattagagaagaaactcctcagcttccaatcaacccctatggaaaagccaagaaaatggcagaagatatcataattgacttctccaacaccactgacatggctgtcatgatcctaagcatccagcattctgatcaaaataatgcctatgtttacagatacttcaatgttattgggtctgacccggaaggaagattaggggaagctccacgacctgagcttcgtgagcatggccgaatctctggtgcttgttttgatgcagctcgagggataacacctggactcaaggttaaagggacagactataaaacagctgatggcacatgtgtacgcgactatatcgatgtcactgacctggttgatgcccatgtgaaagctcttgcccacgcaaaacctcggaaagttggcatttacaatgttggaactggaaaaggcagatcagtgaaggagtttgttgatgcgtgtaagaaggcaacaggcgtggacataaaggttgaataccttgatcgccggccaggagactatgctgaggtcttcagtgatccttccaaaataaaacaagagctaagctggacagctcaatatactgaccttcagaagagtttacagattgcttggaaatggcagaagtcacatttgaatggttattga

SEQ ID NO: 255 - protein, 410 aa, Populus tremuloides
MVHKGSGMDFLDSRRKSNSAGKVIAVAFFIAVCIVMLKQVYSPSYTSPDMFSQHELGVTHVLVTGGAGYIGSHAALRLLKDSYRVTIVDNLSRGNLGAVKVLQELFPEPGRLQFIYADLGDAKAVNKIFAENAFDAVMHFAAVAYVGESTIEPLRYYHNITSNTLVVLEAMAAHNVKTLIYSSTCATYGEPIKMPIREETPQLPINPYGKAKKMAEDIIIDFSNTTDMAVMILSIQHSDQNNAYVYRYFNVIGSDPEGRLGEAPRPELREHGRISGACFDAARGITPGLKVKGTDYKTADGTCVRDYIDVTDLVDAHVKALAHAKPRKVGIYNVGTGKGRSVKEFVDACKKATGVDIKVEYLDRRPGDYAEVFSDPSKIKQELSWTAQYTDLQKSLQIAWKWQKSHLNGY

SEQ ID NO: 256 - DNA, 627 bp, Populus tremuloides
atggctggacaaacaattcttgtgactggtggggctgggtttattggcactcacacagtagtacagctcctaaaggaaggttttaaggtttcaatcattgacaatcttgataattctgtcactgaagctgttgatcgtgttaaggaagtggtgggtcctcagctttctaagaatcttgaattcaatctgggtgatcttagaaacaaggatgatttggagaagttgttttcaagaactaagttcgatgctgtgatccattttgctggtctcaaggcagttggggagagtgttgctaatccacgtagatattttgacaataatctggttggcaccatcaatctctatgaagttatggcaaaatacaattgcaagaagatggttttctcatcatcagcaactgtttatggccaacctgaaaaaattccttgtgttgaggacttcaacctaatggcaatgaatccttatggacgtaccaagaaattgctcgagatattcaaaaggcagaaccagaatggagtatcattttacttaggtacttcaaccccgtgggagctcatgagagtggtaaacttggtgaagatcccaagggtatcccaaacaatctcatgccctacatacaacaagtag

SEQ ID NO: 257 - protein, 208 aa, Populus tremuloides
MAGQTILVTGGAGFIGTHTVVQLLKEGFKVSIIDNLDNSVTEAVDRVKEVVGPQLSKNLEFNLGDLRNKDDLEKLFSRTKFDAVIHFAGLKAVGESVANPRRYFDNNLVGTINLYEVMAKYNCKKMVFSSSATVYGQPEKIPCVEDFNLMAMNPYGRTKKLLEIFKRQNQNGVSFYLGTSTPWELMRVVNLVKIPRVSQTISCPTYNK

SEQ ID NO: 258 - DNA, 1047 bp, Populus tremuloides
atggcgaagagtatcttggttaccggcggtgccggttacatagggagccatacggtgctgcagcttttacttggcggttacagcatcgtggttgttgataatctcgacaactcctctgatattgctcttaaaagagttaaagaactcgccggtgatttcggtaaaaacctcgtctttcaccaggttgatctccgggataagccagcactggaaaaaatttttgccaggacaaaatttgatgctgtcattcactttgctgggctgaaagcggttggtgagagtgtgcagaaaccattgctttactttaacaacaatctcattggaacaattaccctgctagaagttatgacttcccatggatgcaagcagttggtgttttcatcttcggctactgtttatggttgcccaaaggaggttccatgtacagaagagtttcctttgtctgctgccagcccatacggaagaaccaagctcttcattgaagggatctgctgtgatatccaccgttcagactctgaatggaagatcattttgcttagatacttcaatccagttggtgcacatccaagtggtcatattggtgaggatccacttggaattccaaacaatctcatgccctatgtgcagcaagttgctgttggcaggcggcctcatctaaccgtttatggaactgattattcaactaaagatggcactggggtacgtgattacattcatgttgttgatttagcggatgggcacattgctgcattgcgtaagctctctgatgctaatataggttgtgaagtgtacaacttgggaacaggaaaaggtacatccgttctggagatggttgcggcatttgaaaaggcatctagaaagaaaattccccttgtaatggccgctcggcgacctggtgatgctgaaattgtgtatgcagcaacagagaaggcagaacgtgaattgaattggaaggcaaaatatggcattgatgagatgtgtagggatcaatggaactgggccggcaagaacccttatggctatggatcttctgacagcactaactaa

SEQ ID NO: 259 - protein, 348 aa, Populus tremuloides
MAKSILVTGGAGYIGSHTVLQLLLGGYSIVVVDNLDNSSDIALKRVKELAGDFGKNLVFHQVDLRDKPALEKIFARTKFDAVIHFAGLKAVGESVQKPLLYFNNNLIGTITLLEVMTSHGCKQLVFSSSATVYGCPKEVPCTEEFPLSAASPYGRTKLFIEGICCDIHRSDSEWKIILLRYFNPVGAHPSGHIGEDPLGIPNNLMPYVQQVAVGRRPHLTVYGTDYSTKDGTGVRDYIHVVDLADGHIAALRKLSDANIGCEVYNLGTGKGTSVLEMVAAFEKASRKKIPLVMAARRPGDAEIVYAATEKAERELNWKAKYGIDEMCRDQWNWAGKNPYGYGSSDSTN

SEQ ID NO: 260 - DNA, 990 bp, Populus tremuloides
atggcctataatattctggttacaggcggtgctggttacataggaagccacacggtgctgcaacttttattaggcggctacaacactgtggttgttgataacctcgacaacgcctctgatattgctcttaaaagagttaaagaactcgccggtgatttcggcaaaaacctcgtctttcaccaggttgatctccgggacaagccggctctggaaaatgttttcgccgagacaaagtttgatgctgtcattcactttgctgggctgaaagcagttggtgagagtatgcagaaaccattgctttatttcaacaataatctcattggaacaattactctgctagaagttatggctgctcatggatgcaagcaggtaattttctctaggttgctttgcattggtgttttcatcttcagctactgtttatggttggccgaaggaggttccatgtacagaagagttccctttgtctgctgcaaacccatatggaagaaccaagagatctgccgcgatatctacagttcagattctgaatggaagatcatattactcagatactttaatccagttggtgcacatccaagtggctatattggtgaggatcctcgtggaattccaaacaatctcatgccctatgtgcagcaagttgctgttggcaggaggcctcatctaacagtttttggaactgattatccaacaaaagacggtaccggggtacgtgattacattcatgttgtcgatttagcagatgggcacattgctgcattgcgtaagctctctgaagctaatataggttgtgaagtgtacaacttgggaacagggaaaggtacatcagttctggagatggtcgcagcatttgaaaaggcatctggaaagagtcccatcttcgtgtgccagaaaattcctcttgtaatggctgatcggcgacctggtgatgctgaaactgtgtatgcagcaacagagaaggcagaacgtgaattgagttggaagtaa

SEQ ID NO: 261 - protein, 329 aa, Populus tremuloides
MAYNILVTGGAGYIGSHTVLQLLLGGYNTVVVDNLDNASDIALKRVKELAGDFGKNLVFHQVDLRDKPALENVFAETKFDAVIHFAGLKAVGESMQKPLLYFNNNLIGTITLLEVMAAHGCKQVIFSRLLCIGVFIFSYCLWLAEGGSMYRRVPFVCCKPIWKNQEICRDIYSSDSEWKIILLRYFNPVGAHPSGYIGEDPRGIPNNLMPYVQQVAVGRRPHLTVFGTDYPTKDGTGVRDYIHVVDLADGHIAALRKLSEANIGCEVYNLGTGKGTSVLEMVAAFEKASGKSPIFVCQKIPLVMADRRPGDAETVYAATEKAERELSWK

SEQ ID NO: 262 - DNA, 1254 bp, Populus tremuloides
atgctaagttttggcaggaccagaactcagccaaggtccaatagatctatgtcccttggaggcatggatttttcagatccaaaaagaaaaaataatgttgtaggaaagattcttttggccgcttccctaacagctgtatgtataattatgctgaaacaatctccaacctttaattctccaagcccgttctctttgcgtgaagatggggtgatccatgtccttgtgacaggtggtgctggctacattggttcccatgcagcattgcgacttttgaaggatggttaccgagtaaccatagtggacaacctttctcgaggaaacttaggtgcagtcaaggttttacaagagttatttcctgagcctgggaggcttcagtttatatatgctgacttgggagagcctaaaactgttaacagcatcttttcacaaaatgcatttgatgctgtgatgcattttgcagcagttgcatatgttggggaaagcaccgtgtacccccttaagtactatcacaacattacatcaaataccttggtagtgttggagtcaatggctgcaaatgatgtaaagactttgatatattcaagcacatgtgcaacatatggggagcctgaaaagatgcctattactgaagacactccacaggtacccattaatccatatggaaaagctaagaagatggcagaagatatcatccttgacttctctaaaaattcagacatggcaattatgatattgagatacttcaatgtgattggatcagatccagatggaaggttaggtgaggctcctagacctgaactgcgtgagcacggacgaatttctggtgcttgttttgatgctgctcgtggtattgttgctggactaaaggttaaaggaacggactataagacacacgatggaacttgtataagagattatatcgatgttactgatcttgttgatgctcatgttaaagcacttgaaaaggcaatgcctgggaaagttggaatctacaatgttggcactggaatgggtagatcagtcaacgagtttgtacatgcatgtaaaaaggcaaccggtgtagatatcaaagtagactatttacctcgccggcctggtgactatgctgaagtgtttagtgacccatcaaaaattaaccgtgagctgaactggacagcacaatacactgatctccaaaagagtttacaggttgcatggagatggcaaaaatcacatcaaaatgggtatggatcccctttggtgatggcttcttga

SEQ ID NO: 263 - protein, 417 aa, Populus tremuloides
MLSFGRTRTQPRSNRSMSLGGMDFSDPKRKNNVVGKILLAASLTAVCIIMLKQSPTFNSPSPFSLREDGVIHVLVTGGAGYIGSHAALRLLKDGYRVTIVDNLSRGNLGAVKVLQELFPEPGRLQFIYADLGEPKTVNSIFSQNAFDAVMHFAAVAYVGESTVYPLKYYHNITSNTLVVLESMAANDVKTLIYSSTCATYGEPEKMPITEDTPQVPINPYGKAKKMAEDIILDFSKNSDMAIMILRYFNVIGSDPDGRLGEAPRPELREHGRISGACFDAARGIVAGLKVKGTDYKTHDGTCIRDYIDVTDLVDAHVKALEKAMPGKVGIYNVGTGMGRSVNEFVHACKKATGVDIKVDYLPRRPGDYAEVFSDPSKINRELNWTAQYTDLQKSLQVAWRWQKSHQNGYGSPLVMAS

SEQ ID NO: 264 - DNA, 1575 bp, Populus tremuloides
atgattctggtcacaggcggcgccggcttcatcggctcgcatagctgcgtggaactcgccgctgcgggcgagccctacctgatctacgacaacttcagcaacagcagccccgatgtgctcgaacgcatggaacgcatcacgggccggcgcccgctgtgcgtcgagggagacgtgcgcgaccgcgccgcgctggaccggctgtttgccgagcactccatccgcgaggtgatccacttcgccgcgctcaaggccgtgggcgagtccgtggcccagccgctgcgctactacgaacacaacgtgggcggcacggtggccctgctgcaggccatgcggacggcgggcgtgcgcagcctggtgttctcctcctcggccacggtctacggcgatccggccagcctgccgatccgcgaagactttccgctgtccgccaccaacccctacggccgcagcaagctgtggatcgaggaaatgctggccgacctggaccgggccgaggccggccagtggagcctggcacggctgcgctacttcaaccccgtgggcgcccatgaaagcggcctgatcggcgaggacccgcgcgacatccccaacaacctcatgccctatgtgtcgcaggtcgccatcggccagcgccagcagctcagtgtctatggcgatgactatgcgacgccggacggcacgggcgtgcgcgactacatccacgtcaccgacctggcgcgcggccacctggcggcgctgcgctatctgcgcgagcagcagggcctgctgaccgtgaacctgggcacggggcgcccggtctcggtgctggagatggtcaaggccttcgagcgcgccagcggccgccccgtgccctaccagatcgtggcgcgccgacccggcgacgtggcccagtgctgggccgaccccgccgaggccgagcggctgctgggctggaaggccatgctggacctggaccgcatcgcctgcgggcgccgagggcgtggtatcttttcgcccttgtttcacgccctagccaagagtctgcccatgcttgccaaacgcatcatcccctgtcttgacgtcacgggagggcgcgtcgtcaaaggcgtgaacttcgtggaactgcgcgatgcgggcgacccggtggagatcgccgcgcgctacaacgcccagggcgcggacgagctgaccttcctggacatcacggccaccagcgacgggcgcgacctgatcctgcccatcatcgaatcggtggccagccaggtcttcattccgctgaccgtgggtggtggcgtgcgcaccgtcgaggacgtgcgccgcctgctcaacgcgggcgccgacaagaccagcttcaactcggccgccatcgccaaccccgacgtgatcaatgcggcctcggacaagtacggcgcgcaatgcatcgtcgtggccatcgatgccaagcggcgcacggccgaggacgagcagcgcatcggcgccgatggccgcgctgccggccccggctgggacgtgtacagccacggcggacgcaaaaacaccggcctggacgccgtgcactcacgcgcgccgtcagcgacgccgtgcccgtgcccgtga

SEQ ID NO: 265 - protein, 524 aa, Populus tremuloides
MILVTGGAGFIGSHSCVELAAAGEPYLIYDNFSNSSPDVLERMERITGRRPLCVEGDVRDRAALDRLFAEHSIREVIHFAALKAVGESVAQPLRYYEHNVGGTVALLQAMRTAGVRSLVFSSSATVYGDPASLPIREDFPLSATNPYGRSKLWIEEMLADLDRAEAGQWSLARLRYFNPVGAHESGLIGEDPRDIPNNLMPYVSQVAIGQRQQLSVYGDDYATPDGTGVRDYIHVTDLARGHLAALRYLREQQGLLTVNLGTGRPVSVLEMVKAFERASGRPVPYQIVARRPGDVAQCWADPAEAERLLGWKAMLDLDRIACGRRGRGIFSPLFHALAKSLPMLAKRIIPCLDVTGGRVVKGVNFVELRDAGDPVEIAARYNAQGADELTFLDITATSDGRDLILPIIESVASQVFIPLTVGGGVRTVEDVRRLLNAGADKTSFNSAAIANPDVINAASDKYGAQCIVVAIDAKRRTAEDEQRIGADGRAAGPGWDVYSHGGRKNTGLDAVHSRAPSATPCPCP

SEQ ID NO: 266 - DNA, 1059 bp, Ostreococcus tauri
atgacgtggaacgtcctcgtcaccggtggcgccggatacatcggctcgcacacgtgcgtgcggctcctgcaagcgggcgcgcgcgtcaccgtcgtggataactttgacaactcgtgcgcggaatctttaaagcgcgtgcgaaacatcgtgggcgaggacgcgggggcgcgtttgacgcaccacgaggttgattgctgcgataaagtcgcgctcgatggcgtcttcgcgtcggcgggggtgacgttcgatgcggtgatacacttcgccgggttgaaggcggtgggcgagagcgtggccgagccgatgaagtattacgagaataacatcgtgagcacgctggtgctgtgcgagacgatggcgaaacacgggtgtaagacgattatttttagctcgagcgcgaccgtgtacggggagccggcgtcggtgccgtgcacggaagatttcccgacggcggcgttgaacccgtacggacggaccaagttgttcatcgaacacattttgagcgatctctacgtgagtgataaggagtggaaggtggcgctgttgcgatactttaacccggtcggtgcgcacgagagtgggacgctgggggaggatcccaagggaatcccgaataacttgatgccattcgtgcagcaagtcgccgtcggtcgacgacccgagctcaacgtgtttgggaacgactatccaaccaaggatggaaccggtcgacgtgattacattcatgtcgtcgatttggccgacggacacgtcgcggcggtaaagaaactcacgagtgatcccgacgccggtttgctcaccgtcaacctcgggacggggaagagcacgagcgtcttagagctcgtcgcggcgttcgagaaggcgtccggtaagaaaattccgtgcaagattgtcgatcgtcgcgcaggtgacgccgcagaggtgtacggggcgacagataaggcgttcaaggttctcggttggcgtgcacttcgcaccatcgaagactgctgcatcgatcagtggaagtgggcgagctcgaacccgtacgggtacgcaggtaagcccgacgacgcgtaa

SEQ ID NO: 267 - protein, 352 aa, Ostreococcus tauri
MTWNVLVTGGAGYIGSHTCVRLLQAGARVTVVDNFDNSCAESLKRVRNIVGEDAGARLTHHEVDCCDKVALDGVFASAGVTFDAVIHFAGLKAVGESVAEPMKYYENNIVSTLVLCETMAKHGCKTIIFSSSATVYGEPASVPCTEDFPTAALNPYGRTKLFIEHILSDLYVSDKEWKVALLRYFNPVGAHESGTLGEDPKGIPNNLMPFVQQVAVGRRPELNVFGNDYPTKDGTGRRDYIHVVDLADGHVAAVKKLTSDPDAGLLTVNLGTGKSTSVLELVAAFEKASGKKIPCKIVDRRAGDAAEVYGATDKAFKVLGWRALRTIEDCCIDQWKWASSNPYGYAGKPDDA

SEQ ID NO: 268 - DNA, 2100 bp, Ostreococcus tauri
atgacagctcagttacaaagtgaaagtacttctaaaattgttttggttacaggtggtgctggatacattggttcacacactgtggtagagctaattgagaatggatatgactgtgttgttgctgataacctgtcgaattcaacttatgattctgtagccaggttagaggtcttgaccaagcatcacattcccttctatgaggttgatttgtgtgaccgaaaaggtctggaaaaggttttcaaagaatataaaattgattcggtaattcactttgctggtttaaaggctgtaggtgaatctacacaaatcccgctgagatactatcacaataacattttgggaactgtcgttttattagagttaatgcaacaatacaacgtttccaaatttgttttttcatcttctgctactgtctatggtgatgctacgagattcccaaatatgattcctatcccagaagaatgtcccttagggcctactaatccgtatggtcatacgaaatacgccattgagaatatcttgaatgatctttacaatagcgacaaaaaaagttggaagtttgctatcttgcgttattttaacccaattggcgcacatccctctggattaatcggagaagatccgctaggtataccaaacaatttgttgccatatatggctcaagtagctgttggtaggcgcgagaagctttacatcttcggagacgattatgattccagagatggtaccccgatcagggattatatccacgtagttgatctagcaaaaggtcatattgcagccctgcaatacctagaggcctacaatgaaaatgaaggtttgtgtcgtgagtggaacttgggttccggtaaaggttctacagtttttgaagtttatcatgcattctgcaaagcttctggtattgatcttccatacaaagttacgggcagaagagcaggtgatgttttgaacttgacggctaaaccagatagggccaaacgcgaactgaaatggcagaccgagttgcaggttgaagactcctgcaaggatttatggaaatggactactgagaatccttttggttaccagttaaggggtgtcgaggccagattttccgctgaagatatgcgttatgacgcaagatttgtgactattggtgccggcaccagatttcaagccacgtttgccaatttgggcgccagcattgttgacctgaaagtgaacggacaatcagttgttcttggctatgaaaatgaggaagggtatttgaatcctgatagtgcttatataggcgccacgatcggcaggtatgctaatcgtatttcgaagggtaagtttagtttatgcaacaaagactatcagttaaccgttaataacggcgttaatgcgaatcatagtagtatcggttctttccacagaaaaagatttttgggacccatcattcaaaatccttcaaaggatgtttttaccgccgagtacatgctgatagataatgagaaggacaccgaatttccaggtgatctattggtaaccatacagtatactgtgaacgttgcccaaaaaagtttggaaatggtatataaaggtaaattgactgctggtgaagcgacgccaataaatttaacaaatcatagttatttcaatctgaacaagccatatggagacactattgagggtacggagattatggtgcgttcaaaaaaatctgttgatgtcgacaaaaacatgattcctacgggtaatatcgtcgatagagaaattgctacctttaactctacaaagccaacggtcttaggccccaaaaatccccagtttgattgttgttttgtggtggatgaaaatgctaagccaagtcaaatcaatactctaaacaatgaattgacgcttattgtcaaggcttttcatcccgattccaatattacattagaagttttaagtacagagccaacttatcaattttataccggtgatttcttgtctgctggttacgaagcaagacaaggttttgcaattgagcctggtagatacattgatgctatcaatcaagagaactggaaagattgtgtaaccttgaaaaacggtgaaacttacgggtccaagattgtctacagattttcctga

SEQ ID NO: 269 - protein, 699 aa, Ostreococcus tauri
MTAQLQSESTSKIVLVTGGAGYIGSHTVVELIENGYDCVVADNLSNSTYDSVARLEVLTKHHIPFYEVDLCDRKGLEKVFKEYKIDSVIHFAGLKAVGESTQIPLRYYHNNILGTVVLLELMQQYNVSKFVFSSSATVYGDATRFPNMIPIPEECPLGPTNPYGHTKYAIENILNDLYNSDKKSWKFAILRYFNPIGAHPSGLIGEDPLGIPNNLLPYMAQVAVGRREKLYIFGDDYDSRDGTPIRDYIHVVDLAKGHIAALQYLEAYNENEGLCREWNLGSGKGSTVFEVYHAFCKASGIDLPYKVTGRRAGDVLNLTAKPDRAKRELKWQTELQVEDSCKDLWKWTTENPFGYQLRGVEARFSAEDMRYDARFVTIGAGTRFQATFANLGASIVDLKVNGQSVVLGYENEEGYLNPDSAYIGATIGRYANRISKGKFSLCNKDYQLTVNNGVNANHSSIGSFHRKRFLGPIIQNPSKDVFTAEYMLIDNEKDTEFPGDLLVTIQYTVNVAQKSLEMVYKGKLTAGEATPINLTNHSYFNLNKPYGDTIEGTEIMVRSKKSVDVDKNMIPTGNIVDREIATFNSTKPTVLGPKNPQFDCCFVVDENAKPSQINTLNNELTLIVKAFHPDSNITLEVLSTEPTYQFYTGDFLSAGYEARQGFAIEPGRYIDAINQENWKDCVTLKNGETYGSKIVYRFS

SEQ ID NO: 270 - DNA, 1024 bp, Escherichia coli
atggctattctcgttacaggtggtgctggttatattgcatcacatactatactgagtttgatagagcagggtaatgaagtaattattattgataatttatcaaattcatattatgattcgttattgaaaataaaagagattactggatgtgattgtcttttttataaaggagatatccttgacaaaaaactcttgctaaaaatatttgatgaaaataatatcactgctgtgatgcattttgctggtgcaaagtctgtaagtgaatctgttatcagacctttgcaatactatcgaaataatgtctctggcactttttctttagttgaggcaatggaggagtctggtgtagaaaatttaatatttagctcttcagcaactgtctatggtgagccaaagattattcctgtgaatgaaagttgtgctataggtggtactacaaatccgtatggaacgtccaagttatttgtagagaactttttgcgggattattctaaggcatcccctaattttaaaactatagtattaagatattttaaccctatcggtgctcactcatctggaaaaataggtgaagatcctaacggaattccgaataacttgatgccctttatatgccaggttgctatcggtaaacaaaaaacgctcaagatctacggaaatgattatcctactaaagatggtactgggattcgcgattatattcatgttatggatcttgctgaaggtcatgttgctgcattaaataatattaatcaaggagctaattatagagtttacaaccttggaacaggaattggatactctgtgttggaattattagaagcatttcagaaagttacaactcggagagttccctatgtttttactaaaaggcgttcaggtgatattgctgaatgttggtctgatcctaccaaagcgtatgaagaattaggatggaaagcaaggcgagggttagaagatatgattcgtgatgcatggaattggcagcaaaaaaatccaaatggatttaagaaagtttaagtaa

SEQ ID NO: 271 - protein, 339 aa, Escherichia coli
MAILVTGGAGYIASHTILSLIEQGNEVIIIDNLSNSYYDSLLKIKEITGCDCLFYKGDILDKKLLLKIFDENNITAVMHFAGAKSVSESVIRPLQYYRNNVSGTFSLVEAMEESGVENLIFSSSATVYGEPKIIPVNESCAIGGTTNPYGTSKLFVENFLRDYSKASPNFKTIVLRYFNPIGAHSSGKIGEDPNGIPNNLMPFICQVAIGKQKTLKIYGNDYPTKDGTGIRDYIHVMDLAEGHVAALNNINQGANYRVYNLGTGIGYSVLELLEAFQKVTTRRVPYVFTKRRSGDIAECWSDPTKAYEELGWKARRGLEDMIRDAWNWQQKNPNGFKKV

SEQ ID NO: 272 - DNA, 53 bp, Artificial sequence
  primer 1
ggggacaagtttgtacaaaaaagcaggcttaaacaatggtttcggccttgttg

SEQ ID NO: 273 - DNA, 49 bp, Artificial sequence
  primer 2
ggggaccactttgtacaagaaagctgggtgctgctgctactggaggatt

SEQ ID NO: 274 - DNA, 2194 bp, Oryza sativa; identical to SEQ ID NO: 12

SEQ ID NO: 275 - protein, 265 aa, Artificial sequence
  epimerase domain in SEQ ID NO: 2
ILVTGGAGYIGSHTVLQLLQLGFRVVVLDNLDNASELAILRVRELAGHNANNLDFRKVDLRDKQALDQIFSSQRFEAVIHFAGLKAVGESVQKPLLYYDNNLIGTITLLQVMAAHGCTKLVFSSSATVYGWPKEVPCTEESPLCAMNPYGRTKLVIEDMCRDLHASDPNWKIILLRYFNPVGAHPSGYIGEDPCGIPNNLMPFVQQVAVGRRPALTVYGTDYNTKDGTGVRDYIHVVDLADGHIAALRKLYEDSDRIGCEVYNLG

SEQ ID NO: 276 - protein, 7 aa, Artificial sequence
  Motif 1: NAD+ binding
  UNSURE (2)..(3): Xaa can be any naturally occurring amino acid
  UNSURE (5)..(6): Xaa can be any naturally occurring amino acid
GXXGXXG

SEQ ID NO: 277 - protein, 4 aa, Artificial sequence
  Motif 2: active site
  UNSURE (4)..(4): /replace = "Ser"
YGRT

SEQ ID NO: 278 - protein, 12 aa, Artificial sequence
  Motif 3: conserved region
LVTGGAGYIGSH

SEQ ID NO: 279 - protein, 5 aa, Artificial sequence
  Motif 4: conserved region
  UNSURE (2)..(2): Xaa can be any naturally occurring amino acid
  VARIANT (4)..(4): /replace = "Leu"
VXHFA

SEQ ID NO: 280 - protein, 11 aa, Artificial sequence
  Motif 5: conserved region
DGTGVRDYIHV

SEQ ID NO: 281 - DNA, 1047 bp, Brassica napus
atggtgaagaacgttctcgtcacaggcggcgctggctacatcggaagccacacggtgcttcaactgctcaacggtggatactccgccgtagtcgtcgacaatcacgacaattcatccgctgtttctctccaacgcgtcaaaaaactcgccggcgataacggaaaccgcctctccttccaccaggtggatctcagagacaggcctgcgcttgagaagattttctctgaaactaagtttgatgcagtgatacactttgctggacttaaagcagtaggtgagagtgtggagaagcctttgctctattataataataacctttttggcactgttatccttttggaggttatgtctcaattcggctgcaaaaatcttgtgttttcgtcatcagctactgtctatggctggccaaaagaggttccttgcaccgaggagtccccaatttctgcaaccaacccttatggccgtaccaagctttttatcgaggaaatttgccgggatgtacatcgctccgaccctgaatggaagatcatattgcttagatacttcaaccctgttggtgcacatcctagtggttacattggtgaagatcctcttggggttccaaacaacctcatgccttatgtccaacaagttgcagttggccggagacctcacctcaccgtctttggaactgactataacacaaaggatggcacaggggtgagagattacattcatgtgattgacttagcagatggacatatagccgctctgcgcaagctggatgatctcaaaatcagttgtgaggtatacaatcttggaacgggtaatggaacatcagttctagaaatggttgctgcctttgagaaggcatccggaaagaaaatccctttggtgttggctggacgacgtcctggagacgctgagattgtttacgcctcaaccgagaaagcagaacgcgagctaaactggaaggctaagtatgggattgaagacatgtgtagggatctatggaactgggccagcaataatccttacggctacgcctcctccaatggctcctcttaa

SEQ ID NO: 282 - protein, 348 aa, Brassica napus
MVKNVLVTGGAGYIGSHTVLQLLNGGYSAVVVDNHDNSSAVSLQRVKKLAGDNGNRLSFHQVDLRDRPALEKIFSETKFDAVIHFAGLKAVGESVEKPLLYYNNNLFGTVILLEVMSQFGCKNLVFSSSATVYGWPKEVPCTEESPISATNPYGRTKLFIEEICRDVHRSDPEWKIILLRYFNPVGAHPSGYIGEDPLGVPNNLMPYVQQVAVGRRPHLTVFGTDYNTKDGTGVRDYIHVIDLADGHIAALRKLDDLKISCEVYNLGTGNGTSVLEMVAAFEKASGKKIPLVLAGRRPGDAEIVYASTEKAERELNWKAKYGIEDMCRDLWNWASNNPYGYASSNGSS

SEQ ID NO: 283 - DNA, 1047 bp, Brassica napus
atggtgaagaacgttctggtcacaggcggcgctggctacatcggtagccacacggtgcttcaacttctcaacggaggctactccgtcgtagtcgtcgacaatcacgacaattcatccgctgtttctctccaacgcgtcaaaaaactcgccggcgataacggaaaccgcctctccttccaccaggtggatctcagagacaggcctgcgcttgagaagattttctcagaaactaagtttgatgcagtgatacactttgctggacttaaagcagtaggtgagagtgtggagaagcccctgctttattataataataacttatttggcactgttatccttttggaggttatgtctcagttcggctgcaaaaatcttgtgttttcgtcatcagctactgtctatggctggccaaaagaggttccttgtaccgaggagtccccaatttctgcaaccaacccttatggccgtaccaagctttttatcgaggaaatttgccgggatgtacatcgctccgaccctgaatggaagatcatattgctcagatacttcaaccctgttggtgcacatcctagtggttacattggtgaagatcctcttggggttccaaacaacctcatgccttatgtccaacaagttgcagttggccggagacctcacctcaccgtctttggaactgactataacacaaaggatggcacaggggtgagagattacattcatgtgattgacttagcagatggacatatagccgctctgcgcaagctggatgatctcaaaatcagttgtgaggtatacaatcttggaacgggtaatggaacatcagttctagaaatggttgctgcctttgagaaggcatccggaaagaaaatccctttggtgttggctggacgacgtcctggagacgctgagattgtttacgcctcaaccgagaaagcagaacgcgagctaaactggaaggctaagtatgggattgaagacatgtgtagggatctatggaactgggccagcaataatccttacggctacgcctcctccaatggctcctcttaa

SEQ ID NO: 284 - protein, 348 aa, Brassica napus
MVKNVLVTGGAGYIGSHTVLQLLNGGYSVVVVDNHDNSSAVSLQRVKKLAGDNGNRLSFHQVDLRDRPALEKIFSETKFDAVIHFAGLKAVGESVEKPLLYYNNNLFGTVILLEVMSQFGCKNLVFSSSATVYGWPKEVPCTEESPISATNPYGRTKLFIEEICRDVHRSDPEWKIILLRYFNPVGAHPSGYIGEDPLGVPNNLMPYVQQVAVGRRPHLTVFGTDYNTKDGTGVRDYIHVIDLADGHIAALRKLDDLKISCEVYNLGTGNGTSVLEMVAAFEKASGKKIPLVLAGRRPGDAEIVYASTEKAERELNWKAKYGIEDMCRDLWNWASNNPYGYASSNGSS

SEQ ID NO: 285 - DNA, 1068 bp, Zea mays
atggtgtccgccgtgctccggaccatcctcgtgacgggcggcgccgggtacatcggcagccacacggtgctgcagctgctgcagcagggcttccgcgtcgtcgtcgtcgacaacctcgacaacgcctccgaggccgccctcgcccgcgtcgccgagctcgccgggcacgacggcgccaacctcgtcttccacaaggttgaccttcgcgacaggcacgcgttggtggacatcttctcgtcgcacaggttcgaggctgtcattcactttgctgggctcaaggctgttggggagagcgtgcacaagcccctactttactacgacaacaacctggtcggcaccatcaccctcctggaggtgatggctgcgaacggctgcaagaagctggtgttctcgtcatctgcaactgtctatgggtggcccaaggaagtaccctgcaccgaagaattcccgctctgcgccaccaatccctatgggcggacaaagcttgtgattgaagacatctgccgcgacgtccaccgctccgaccccgactggaagatcatactgctcaggtacttcaaccccgttggcgctcatccaagcgggtacatcggcgaagacccctgcggtgtcccgaacaacctgatgccctacgtgcagcaagtcgctgttgggaggttacctcacctcacggtctacgggacggactacagcaccaaggatgggactggggtgcgtgattacatccacgttgtcgacctggctgacggccacatagcagccctgaggaagctctacgaagactccgacaaaataggctgtgaagtgtacaacttggggactggaaaggggacgtccgtgttggaaatggtggctgcattcgagaaggcttctgggaagaaaatccctctggtgttcgctgggcgaagacccggagacgcagagatcgtctacgccgcaactgccaaggcagagaaggagctcaaatggaaggccaagtacgggatcgaggagatgtgcagagatctgtggaactgggcgagcaagaacccgtacgggtacgctgggtcacgcgacaacagcaaatga

SEQ ID NO: 286 - protein, 355 aa, Zea mays
MVSAVLRTILVTGGAGYIGSHTVLQLLQQGFRVVVVDNLDNASEAALARVAELAGHDGANLVFHKVDLRDRHALVDIFSSHRFEAVIHFAGLKAVGESVHKPLLYYDNNLVGTITLLEVMAANGCKKLVFSSSATVYGWPKEVPCTEEFPLCATNPYGRTKLVIEDICRDVHRSDPDWKIILLRYFNPVGAHPSGYIGEDPCGVPNNLMPYVQQVAVGRLPHLTVYGTDYSTKDGTGVRDYIHVVDLADGHIAALRKLYEDSDKIGCEVYNLGTGKGTSVLEMVAAFEKASGKKIPLVFAGRRPGDAEIVYAATAKAEKELKWKAKYGIEEMCRDLWNWASKNPYGYAGSRDNSK

SEQ ID NO: 287 - DNA, 1068 bp, Zea mays
atggtgtccgccgtgctccggaccatcctcgtgacgggcggcgccgggtacatcggcagccacacggtgctgcagctgctgcagcagggcttccgcgtcgtcgtcgtcgacaacctcgacaacgcctccgaggccgccctcgcccgcgtcgccgagctcgccgggcacgacggcgccaacctcgtcttccacaaggttgaccttcgcgacaggcacgcgttggtggacatcttctcgtcgcacaggttcgaggctgtcattcactttgctgggctcaaggctgttggggagagcgtgcacaagcccctactttactacgacaacaacctggtcggcaccatcaccctcctcgaggtgatggctgcgaacggctgcaagaagctggtgttctcgtcatctgcaactgtctatgggtggcccaaggaagtaccatgcaccgaagaattcccgctctgcgccaccaatccctatgggcggacaaagcttgtgattgaagacatctgccgcgacgtccaccgctccgaccccgactggaagatcatactgctcaggtacttcaaccccgttggcgctcatccaagcgggtacatcggcgaagacccctgcggtgtcccgaacaacctgatgccctacgtgcagcaagtcgctgttgggaagttacctcacctcacggtctacgggacggactacagcaccaaggatgggactggggtgcgtgattacatccacgttgtcgacctggctgacggccacatagcagccctgaggaagctctacgaagactccgacaaaataggctgtgaagtgtacaacttggggactggaaaggggacgtccgtgttggaaatggtggctgcattcgagaaggcttctgggaagaaaatccctctggtgttcgctgggcgaagacccggagacgcagagatcgtctacgccgcaactgccaaggcagagaaggagctcaaatggaaggccaagtacgggatcgaggagatgtgcagagatctgtggaactgggcgagcaagaacccgtacgggtacgctgggtcacgcgacaacagcaaatga

SEQ ID NO: 288 - protein, 355 aa, Zea mays
MVSAVLRTILVTGGAGYIGSHTVLQLLQQGFRVVVVDNLDNASEAALARVAELAGHDGANLVFHKVDLRDRHALVDIFSSHRFEAVIHFAGLKAVGESVHKPLLYYDNNLVGTITLLEVMAANGCKKLVFSSSATVYGWPKEVPCTEEFPLCATNPYGRTKLVIEDICRDVHRSDPDWKIILLRYFNPVGAHPSGYIGEDPCGVPNNLMPYVQQVAVGKLPHLTVYGTDYSTKDGTGVRDYIHVVDLADGHIAALRKLYEDSDKIGCEVYNLGTGKGTSVLEMVAAFEKASGKKIPLVFAGRRPGDAEIVYAATAKAEKELKWKAKYGIEEMCRDLWNWASKNPYGYAGSRDNSK

SEQ ID NO: 289 - DNA, 1068 bp, Zea mays
atggtgtccgccgtgctccggaccatcctcgtgacgggcggcgccgggtacatcggcagccacacggtgctgcagctgctgcagcagggcttccgcgtcgtcgtcgtcgacaacctcgacaacgcctccgaggccgccctcgcccgcgtcgccgagctcgccgggcacgacggcgccaacctcgtcttccacaaggttgaccttcgcgacaggcacgcgttggtggacatcttctcgtcgcacaggttcgaggctgtcattcactttgctgggctcaaggctgttggggagagcgtgcacaagcccctactttactacgacaacaacctggtcggcaccatcaccctcctcgaggtgatggctgcgaacggctgcaagaagctggtgttctcgtcatctgcaactgtctatgggtggcccaaggaagtaccatgcaccgaagaattcccgctctgcgccaccaatccctatgggcggacaaagcttgtgattgaagacatctgccgcgacgtccaccgctccgaccccgactggaagatcatactgctcaggtacttcaaccccgttggcgctcatccaagcgggtacatcggcgaagacccctgcggtgtcccgaacaacctgatgccctacgtgcagcaagtcgctgttgggaggttacctcacctcacggtctacgggacggactacagcaccaaggatgggactggggtgcgtgattacatccacgttgtcgacctggctgacggccacatagcagccctgaggaagctctacgaagactccgacaaaataggctgtgaagtgtacaacttggggactggaaaggggacgtcggtgttggaaatggtggctgcattcgagaaggcttctgggaagaaaatccctctggtgttcgctgggcgaagacccggagacgcagagatcgtctacgccgcaactgccaaggcagagaaggagctcaaatggaaggccaagtacgggatcgaggagatgtgcagagatctgtggaactgggcgagcaagaacccgtacgggtacgctgggtcacgcgacaacagcaaatga

SEQ ID NO: 290 - protein, 355 aa, Zea mays; identical to SEQ ID NO: 286

SEQ ID NO: 291 - DNA, 1272 bp, Zea mays
atggcggtggagaagacgctgcccggcgcgagtgcggggaggaccgtgctggtcacgggcggggcgggctacatcggtagccacgccgtgctgcagctcctcctcgcgggcttccgcgccgtcgtcatcgacaacctcaacaactcctccgagctggccgtccgccgcgtcgccgcgctcgcgggggaccactcccgcaacctctctttccacaagattgatctccgtgacaagggagcactggaaatggtttttgcttctacaagatttgaagctgtcattcacttcgctggattgaaagctgtgggtgaaagcgtacagaagccattactttattatgacaacaacgtcattggcacgataaatcttctagaagttatgtctgttcacggttgcaagaagttggtgttctcatcatcagctgcagtttatggatcacccaaaaactcaccctgcacagaaaattttcctcttactccaaacaatccatatggcaaaacaaagctcgttgttgaagatatttgccgggatatctaccgttcagatcctgaatggaagatcattttacttaggtacttcaatccagttggtgctcatcctagtggatatcttggcgaggacccacgaggaattcccaacaatcttatgccctatgttcagcaagttgcggttggtaggaggccagctctaacagttttaggaaatgactatgcaacaagagatgggactggggtccgagattacatccatgtggttgaccttgctgacggacatattgctgcattgcagaagctttttgagaactctagcatagggtgtgaagcgtacaaccttggaaccggaagaggtacatctgtgctggagattgttaaagcatttgagaaggcttctgggaagaaaatacctctgatttttggtgaaagacgcccaggtgatgcagagattctgttttcagagactactaaagcagagagggagcttaactggaaagcaaaatacggtattgaagagatgtgccgcgaccaatggaactgggccagcaagaacccttatggctatggatcacctgactctatcaagcagaatggtcaccaaacaaacggatccgctgactcctccaagcagaatggccaccgcacaaacggttcaactgactcacccaagcggaacggccaccatgcgtatgggtctgctgactcacccaagcgcaacgggcactgcgtttttggatcatcagacctcaagccgaatggtaatggccacctgcgctga

SEQ ID NO: 292 - protein, 423 aa, Zea mays
MAVEKTLPGASAGRTVLVTGGAGYIGSHAVLQLLLAGFRAVVIDNLNNSSELAVRRVAALAGDHSRNLSFHKIDLRDKGALEMVFASTRFEAVIHFAGLKAVGESVQKPLLYYDNNVIGTINLLEVMSVHGCKKLVFSSSAAVYGSPKNSPCTENFPLTPNNPYGKTKLVVEDICRDIYRSDPEWKIILLRYFNPVGAHPSGYLGEDPRGIPNNLMPYVQQVAVGRRPALTVLGNDYATRDGTGVRDYIHVVDLADGHIAALQKLFENSSIGCEAYNLGTGRGTSVLEIVKAFEKASGKKIPLIFGERRPGDAEILFSETTKAERELNWKAKYGIEEMCRDQWNWASKNPYGYGSPDSIKQNGHQTNGSADSSKQNGHRTNGSTDSPKRNGHHAYGSADSPKRNGHCVFGSSDLKPNGNGHLR

SEQ ID NO: 293 - DNA, 1272 bp, Zea mays; identical to SEQ ID NO: 291

SEQ ID NO: 294 - protein, 423 aa, Zea mays; identical to SEQ ID NO: 292

SEQ ID NO: 295 - DNA, 1272 bp, Zea mays; identical to SEQ ID NO: 291

SEQ ID NO: 296 - protein, 423 aa, Zea mays; identical to SEQ ID NO: 292

SEQ ID NO: 297 - DNA, 1272 bp, Zea mays
atggcggtggagaagacgctgcccggcgcgagtgctgggaggaccgtgctggtcacgggcggggcgggctacatcggtagccacgccgtgctgcagctcctcctcgcgggcttccgcgccgtcgtcgtcgacaacctcaacaactcctccgagctggccgtccgccgcgtcgccgcgctcgcgggggaccactcccgcaacctctctttccacaagattgatctccgtgacaagggagcactggaaatggtttttgcttctacaagatttgaagctgtcattcacttcgctggattgaaagctgtgggtgaaagcgtacagaagccattactttattatgacaacaacgtcattggcacgataaatcttctagaagttatgtctgttcacggttgcaagaagttggtgttctcatcatcagctgcagtttatggatcacccaaaaactcaccctgcacagaaaattttcctcttactccaaacaatccatatggcaaaacaaagctcgttgttgaagatatttgccgggatatctaccgttcagatcctgaatggaagatcattttacttaggtacttcaatccagttggtgctcatcctagtggatatcttggcgaggacccacgaggaattcccaacaatcttatgccctatgttcagcaagttgcggttggtaggaggccagctctaacagttttaggaaatgactatgcaacaagagatgggactggggtccgagattacatccatgtggttgaccttgctgacggacatattgctgcattgcagaagctttttgagaactctagcatagggtgtgaagcgtacaaccttggaaccggaagaggtacatctgtgctggagattgttaaagcatttgagaaggcttctgggaagaaaatacctctgatttttggtgaaagacgcccaggtgatgcagagattctgttttcagagactactaaagcagagagggagcttaactggaaagcaaaatacggtattgaagagatgtgccgcgaccaatggaactgggccagcaagaacccttatggctatggatcacctgactctatcaagcagaatggtcaccaaacaaacggatccgctgactcctccaagcagaatggccaccgcacaaacggttcaactgactcacccaagcggaacggccaccatgcgtatgggtctgctgactcacccaagcgcaacgggcactgcgtttttggatcatcagacctcaagccgaatggtaatggccacctgcgctga

SEQ ID NO: 298 - protein, 423 aa, Zea mays
MAVEKTLPGASAGRTVLVTGGAGYIGSHAVLQLLLAGFRAVVVDNLNNSSELAVRRVAALAGDHSRNLSFHKIDLRDKGALEMVFASTRFEAVIHFAGLKAVGESVQKPLLYYDNNVIGTINLLEVMSVHGCKKLVFSSSAAVYGSPKNSPCTENFPLTPNNPYGKTKLVVEDICRDIYRSDPEWKIILLRYFNPVGAHPSGYLGEDPRGIPNNLMPYVQQVAVGRRPALTVLGNDYATRDGTGVRDYIHVVDLADGHIAALQKLFENSSIGCEAYNLGTGRGTSVLEIVKAFEKASGKKIPLIFGERRPGDAEILFSETTKAERELNWKAKYGIEEMCRDQWNWASKNPYGYGSPDSIKQNGHQTNGSADSSKQNGHRTNGSTDSPKRNGHHAYGSADSPKRNGHCVFGSSDLKPNGNGHLR

SEQ ID NO: 299 - DNA, 1068 bp, Zea mays
atggtgtccgccgtgctccggaccatcctcgtgacgggcggcgccgggtacatcggcagccacacggtgctgcagctgctgcagcagggcttccgcgtcgtcgtcgtcgacaacctcgacaacgcctccgaggccgccctcgcccgcgtcgccgagctcgccgggcacgacggcgccaacctcgtcttccacaaggttgaccttcgcgacaggcacgcgttggtggacatcttctcgtcgcacaggttcgaggctgtcattcactttgctgggctcaaggctgttggggagagcgtgcacaagcccctactttactacgacaacaacctggtcggcaccatcaccctcctggaggtgatggctgcgaacggctgcaagaagctggtgttctcgtcatctgcaactgtctatgggtggcccaaggaagtaccctgcaccgaagaattcccgctctgcgccaccaatccctatgggcggacaaagcttgtgattgaagacatctgccgcgacgtccaccgctccgaccccgactggaagatcatactgctcaggtacttcaaccccgttggcgctcatccaagcgggtacatcggcgaagacccctgcggtgtcccgaacaacctgatgccctacgtgcagcaagtcgctgttgggaagttacctcacctcacggtctacgggacggactacagcaccaaggatgggactggggtgcgtgattacatccacgttgtcgacctggctgacggccacatagcagccctgaggaagctctacgaagactccgacaaaataggctgtgaagtgtacaacttggggactggaaaggggacgtccgtgttggaaatggtggctgcattcgagaaggcttctgggaagaaaatccctctggtgttcgctgggcgaagacccggagacgcagagatcgtctacgccgcaactgccaaggcagagaaggagctcaaatggaaggccaagtacgggatcgaggagatgtgcagagatctgtggaactgggcgagcaagaacccgtacgggtacgctgggtcacgcgacaacagcaaatga

SEQ ID NO: 300 - protein, 355 aa, Zea mays; identical to SEQ ID NO: 288

SEQ ID NO: 301 - DNA, 1065 bp, Oryza sativa; identical to SEQ ID NO: 228

SEQ ID NO: 302 - protein, 354 aa, Oryza sativa; identical to SEQ ID NO: 229

SEQ ID NO: 303 - DNA, 1176 bp, Glycine max
atggcatcgcgcgtcagcattggcaaccttacctcctccgcgccgtatattaattcccctcactttcgctcaccacttaagatttccaacaacccctctctgcaaaacgcttcgcataaggtacttatgcgcgataagactgtactggtaaccggcggagccggttacatcggcagccacaccgttcttcagctcttgctcggaggtttcagagccgtcgtcctcgacaacctcgaaaattcctccgaggttgccatccacagagtcagggagctcgccggcgaatttgggaacaacctctcctttcacaaggtggacctacgggacagagctgctctagaccaaatattttcttccacacaattcgatgctgtcatacattttgctggactgaaagcagtaggagaaagtgtgcaaaaacctttactatactataacaacaacttgactgggacaatcactctattggaagtcatggctgcccatggatgcaagaagctcgtgttttcatcttcagcaactgtatatggttggccaaaggaggttccatgcacagaagagttccctctgtcagcaatgaacccatatggacgaactaagcttatcattgaagaaatttgccgtgatgtccactgtgcagagccagattgtaaaataattttgttaagatacttcaacccagttggtgcacaccccagtggttatattggggaggatcctcgtggaattccaaacaatctcatgccatttgttcagcaagtagcagttggccgacggcctgcactgacagtttttggaaatgattataatacaagtgatggcactggggttcgggattacattcatgttgttgatttagcagatgggcacattgctgcattgcttaaactagatgaacctaatataggttgtgaggtttataacctgggaacaggaaagggaacatcagttttggagatggttagagcttttgaaatggcatctggaaagaaaattccacttgtgatggctggccgtagacctggtgatgctgaaattgtttatgcatcaacaaagaaagcggaaagagagcttaaatggaaggcaaaatatggcattgatgagatgtgccgtgatcaatggaattgggctagcaaaaacccttatggctatggagatcagggctccaccgattaa

SEQ ID NO: 304 - protein, 391 aa, Glycine max
MASRVSIGNLTSSAPYINSPHFRSPLKISNNPSLQNASHKVLMRDKTVLVTGGAGYIGSHTVLQLLLGGFRAVVLDNLENSSEVAIHRVRELAGEFGNNLSFHKVDLRDRAALDQIFSSTQFDAVIHFAGLKAVGESVQKPLLYYNNNLTGTITLLEVMAAHGCKKLVFSSSATVYGWPKEVPCTEEFPLSAMNPYGRTKLIIEEICRDVHCAEPDCKIILLRYFNPVGAHPSGYIGEDPRGIPNNLMPFVQQVAVGRRPALTVFGNDYNTSDGTGVRDYIHVVDLADGHIAALLKLDEPNIGCEVYNLGTGKGTSVLEMVRAFEMASGKKIPLVMAGRRPGDAEIVYASTKKAERELKWKAKYGIDEMCRDQWNWASKNPYGYGDQGSTD

SEQ ID NO: 305 - DNA, 1053 bp, Glycine max
atgcctgcccaatcgattctggttaccggaggagccggttacatcggtagccacaccatccttcagcttctcctcagcggttaccatgtcttcgccgtcgacaacttcgacaattcttccgaaaccgccatcaacagagtcaaggaactcgccggagaattagcaaataacctttccttttgcaagcttgacttgcgggacagagctgccctcgagaaaatattttcaaccgtaaagtttgatgccgtcatacattttgctgggcttaaagcagtgggtgaaagcgtgaagaaaccactgctctactttgacaacaatttgatagggacaatcgttctatttgaagtcatggctgcccacggatgcaagaagcttgtgttctcatcttcagcaactgtatatgggtggccaaaggaggtcccatgtaccgaagagttccctttgtcagcaacaaacccatatggacgaaccaagcttatcatcgaagaaatttgtcgcgatatccaccgtgcagattcagattggacagttatactattgagatacttcaacccagttggtgcacatcccagtggttatattggtgaggatcctcttggaattccaaacaatctcatgccctttgttcaacaagtggcagttggcagacgccctgcattgacagtttttggaagcgattataaaacaactgacggcactggagttcgtgattacattcatgttcttgatttagcagatgggcatattgctgcgttgcgtaaactggatgatcctaaaataggttgtgaggtttataacttgggaacaggaaagggaacatcagttttggagatggtaaacgcttttgaacaggcctctggaaagaaaattccacttgcaatggcgggtcggagacctggagatgctgaaattgtttatgcatcaacagaaaaagcggaaagagaacttaattggaagactaaatatagcatcgatgatatgtgccgcgatcaatggaattgggctagcaaaaacccttatggctatggtgcatctgcagattcctccaattga

SEQ ID NO: 306 - protein, 350 aa, Glycine max
MPAQSILVTGGAGYIGSHTILQLLLSGYHVFAVDNFDNSSETAINRVKELAGELANNLSFCKLDLRDRAALEKIFSTVKFDAVIHFAGLKAVGESVKKPLLYFDNNLIGTIVLFEVMAAHGCKKLVFSSSATVYGWPKEVPCTEEFPLSATNPYGRTKLIIEEICRDIHRADSDWTVILLRYFNPVGAHPSGYIGEDPLGIPNNLMPFVQQVAVGRRPALTVFGSDYKTTDGTGVRDYIHVLDLADGHIAALRKLDDPKIGCEVYNLGTGKGTSVLEMVNAFEQASGKKIPLAMAGRRPGDAEIVYASTEKAERELNWKTKYSIDDMCRDQWNWASKNPYGYGASADSSN

SEQ ID NO: 307 - DNA, 1050 bp, Glycine max
atgcgcgacaagactgtgctggtaaccggcggagccggttacatcggcacccacaccgttcttcagctcttgctcggaggttgcagaaccgtcgtcgtcgacaatctcgacaattcctccgaggtttctatccaccgagtcagggagcttgccggcgaatttgggaacaacctctcctttcacaaggtggacctacgggacagggatgcactagagcaaatttttgtttccacacaatttgatgctgtcatacactttgctggactgaaagcagtaggagaaagtgtgcaaaaacctttactatactataacaacaacttgactgggacaatcactctattggaagtcatggctgcccatggatgcaagaagctcgtgttctcttcttcagcaactgtatatggttggccaaaggaagttccatgcacagaagagttccctctgtcagcaatgaacccatatggacgaactaagcttatcattgaagaaatttgccgtgatgtccactgtgcagagccagattgtaaaataattttgttaagatacttcaacccagttggtgcacaccccagcggttatattggggaggatcctcgcggaattccaaacaatctcatgccatttgttcagcaagtagcagttggccgacggcctgcactgacagtttttggaaatgattataatacaagtgatggcactggggttcgggattacattcatgttgttgatttagcagatgggcacattgctgcattgcttaaactagatgaacctaatataggttgtgaggtttataacctgggaacaggaaagggaacatcagttttggagatggttagagcttttgaaatggcatctggaaagaaaattccacttgtgatggctggccgtagacctggtgatgctgaaattgtttatgcatcaacaaagaaagcggaaagagagcttaaatggaaggcaaaatatggcattgatgagatgtgccgtgatcaatggaattgggctagcaaaaacccttatggctatggagatcagggctccaccgattaa

SEQ ID NO: 308 - protein, 349 aa, Glycine max
MRDKTVLVTGGAGYIGTHTVLQLLLGGCRTVVVDNLDNSSEVSIHRVRELAGEFGNNLSFHKVDLRDRDALEQIFVSTQFDAVIHFAGLKAVGESVQKPLLYYNNNLTGTITLLEVMAAHGCKKLVFSSSATVYGWPKEVPCTEEFPLSAMNPYGRTKLIIEEICRDVHCAEPDCKIILLRYFNPVGAHPSGYIGEDPRGIPNNLMPFVQQVAVGRRPALTVFGNDYNTSDGTGVRDYIHVVDLADGHIAALLKLDEPNIGCEVYNLGTGKGTSVLEMVRAFEMASGKKIPLVMAGRRPGDAEIVYASTKKAERELKWKAKYGIDEMCRDQWNWASKNPYGYGDQGSTD

SEQ ID NO: 309 - DNA, 1050 bp, Glycine max
atgcgcgacaagactgtgctggtaaccggcggagccggttacatcggcacccacaccgttcttcagctcttgctcggaggttgcagaaccgtcgtcgtcgacaatctcgacaattcctccgaggtttctatccaccgagtcagggagcttgccggcgaatttgggaacaacctctcctttcacaaggtggacctacgggacagggatgcactagagcaaatttttgtttccacacaatttgatgctgtcatacactttgctggactgaaagcagtaggagaaagtgtgcaaaaacctttactatactataacaacaacttgactgggacaatcactctattggaagtcatggctgcccatggatgcaagaagctcgtgttctcttcttcagcaactgtatatggttggccaaaggaagttccatgcacagaagagttccctctgtcagcaatgaacccatatggacgaactaagcttatcattgaagaaatttgtcgtgatgtccaccgtgcagagccagattggaaaataatattgttaagatacttcaacccagtcggtgcacaccctagcggttgtattggggaggatccccgcggaattccaaacaatctcatgccatttgttcagcaagtagcagttggccgacggcctgcactgacagtttttggaaatgattataatacaactgatggcactggggttcgggattacattcatgttgttgatttagcagatgggcacattgctgcattgcttaaactagatgaacctaatataggttgtgaggtttataacctgggaacaggaaagggaacatcagttttggagatggttagagcttttgaaatggcatctggaaagaaaattccacttgtgatggctggccgtagacctggtgatgctgaaattgtttatgcatcaacaaagaaagcggaaagagagcttaaatggaaggcaaaatatggcattgatgagatgtgccgaaatcaatggaattgggctagcaaaaacccttatggctatggagatcagggctccaccgattaa

SEQ ID NO: 310 - protein, 349 aa, Glycine max
MRDKTVLVTGGAGYIGTHTVLQLLLGGCRTVVVDNLDNSSEVSIHRVRELAGEFGNNLSFHKVDLRDRDALEQIFVSTQFDAVIHFAGLKAVGESVQKPLLYYNNNLTGTITLLEVMAAHGCKKLVFSSSATVYGWPKEVPCTEEFPLSAMNPYGRTKLIIEEICRDVHRAEPDWKIILLRYFNPVGAHPSGCIGEDPRGIPNNLMPFVQQVAVGRRPALTVFGNDYNTTDGTGVRDYIHVVDLADGHIAALLKLDEPNIGCEVYNLGTGKGTSVLEMVRAFEMASGKKIPLVMAGRRPGDAEIVYASTKKAERELKWKAKYGIDEMCRNQWNWASKNPYGYGDQGSTD

SEQ ID NO: 311 - DNA, 1176 bp, Glycine max; identical to SEQ ID NO: 303

SEQ ID NO: 312 - protein, 391 aa, Glycine max; identical to SEQ ID NO: 304

SEQ ID NO: 313 - DNA, 1059 bp, Helianthus annuus
atgacgcggccgatgtgcatactggtgaccggtggtgccggttatataggaagtcatactgttttgcagttgttgttaaatggttacagtacggtggtggttgataatttggataattcgtcggaagttgctatcagtcgggttcgagaactcgctggtgatcgtggtcgtaatctgtcttttcacaagatggatatccgggataagcctgcactagagcagctttttgcttctacaaagtttgacgcggttatacattttgctggattaaaggcagttggtgaaagcgtgcagaagccgttgatgtattacaacaataatatcgttggtactataactttattggaagttatggctgcctatggctgcaagaagcttgtgttttcatcatcggctactgtttatggctggccaaaggagttgccgtgcacagaagagtttcccttgtctgcagccaacccgtatggacgaacaaagctaatgatcgaggagatgtgccgagatgtatatgcttcagaccctgagtggaaatttgtattgttgcggtattttaaccctgttggtgcacatcccagtggccgaattggcgaagatcctcatggaattccaaacaatcttatgccttttattcagcatgttgctgttggtagacaacctgcgcttaaagtgttcggaactgattactccacaaaagatggaactggggtacgtgattacatccatgtcgtagatttagcagacggacatactgcggcgttggcgaaactttctgatcccaaaataggttgtgaagtttataacttggggactggtaaagggacatctgttttggagatggtatcagcctttgaaaaggcatcaggaaagaaaatcccattaataaagactgcacgacgacctggtgatgctgagattgtatatgcgtcaacaacaaaggcagaacgcgagttaaactggaaggcaaagtatggaatagaggagatgtgcagagatcagtggaactgggctagcaggaatccttacggctatcagactgaagcaaagaaacttggtgcatga

SEQ ID NO: 314 - protein, 352 aa, Helianthus annuus
MTRPMCILVTGGAGYIGSHTVLQLLLNGYSTVVVDNLDNSSEVAISRVRELAGDRGRNLSFHKMDIRDKPALEQLFASTKFDAVIHFAGLKAVGESVQKPLMYYNNNIVGTITLLEVMAAYGCKKLVFSSSATVYGWPKELPCTEEFPLSAANPYGRTKLMIEEMCRDVYASDPEWKFVLLRYFNPVGAHPSGRIGEDPHGIPNNLMPFIQHVAVGRQPALKVFGTDYSTKDGTGVRDYIHVVDLADGHTAALAKLSDPKIGCEVYNLGTGKGTSVLEMVSAFEKASGKKIPLIKTARRPGDAEIVYASTTKAERELNWKAKYGIEEMCRDQWNWASRNPYGYQTEAKKLGA

SEQ ID NO: 315 - DNA, 1497 bp, Zea mays
gaagcacggcaatctcgatctcgttcgttcccctgagcggcagtcagtgcgagcgagcgcgcacacagacaactcatcctctcccctctctctctcacacacacacatccatcatcccatccctgtgacgggcgatccgagggcctaccgacgatggtgtccgccgtgctccggaccatcctcgtgacgggcggcgccgggtacatcggcagccacacggtgctgcagctgctgcagcagggcttccgcgtcgtcgtcgtcgacaacctcgacaacgcctccgaggccgccctcgcccgcgtcgccgagctcgccgggcacgacggcgccaacctcgtcttccacaaggttgaccttcgcgacaggcacgcgttggtggacatcttctcgtcgcacaggttcgaggctgtcattcactttgctgggctcaaggctgttggggagagcgtgcacaagcccctactttactacgacaacaacctggtcggcaccatcaccctcctggaggtgatggctgcgaacggctgcaagaagctggtgttctcgtcatctgcaactgtctatgggtggcccaaggaagtaccctgcaccgaagaattcccgctctgcgccaccaatccctatgggcggacaaagcttgtgattgaagacatctgccgcgacgtccaccgctccgaccccgactggaagatcatactgctcaggtacttcaaccccgttggcgctcatccaagcgggtacatcggcgaagacccctgcggtgtcccgaacaacctgatgccctacgtgcagcaagtcgctgttgggaggttacctcacctcacggtctacgggacggactacagcaccaaggatgggactggggtgcgtgattacatccacgttgtcgacctggctgacggccacatagcagccctgaggaagctctacgaagactccgacaaaataggctgtgaagtgtacaacttggggactggaaaggggacgtccgtgttggaaatggtggctgcattcgagaaggcttctgggaagaaaatccctctggtgttcgctgggcgaagacccggagacgcagagatcgtctacgccgcaactgccaaggcagagaaggagctcaaatggaaggccaagtacgggatcgaggagatgtgcagagatctgtggaactgggcgagcaagaacccgtacgggtacgctgggtcacgcgacaacagcaaatgaaccacccatccatgcatcccatcctgcagtaggagcaagcagcagccttatagcctatgctaccataattagtaactcatcaatcatgcatacacataattagtaactcatcaatcatgcatacataatcagccagtcatctgattaggggtactgcgatgggcctcgcttcttcagtgtatagagggaggaggagggggggtcatcttgatattcttttttttttatcattcccgaatgattattattagtagccagttcgatgaaaaaaaaaaa

SEQ ID NO: 316 - protein, 355 aa, Zea mays; identical to SEQ ID NO: 286

SEQ ID NO: 317 - DNA, 1980 bp, Zea mays
cattccatcgtcttcgcttccactccccacgttccccgcctgcttcctccaggccccggccagatccgcgcgcccgcggggaagagggcctcctctcctccctcctcccttggctcgcgctctggtcgaggaggcggaggccggtgccggcgggcgggcggggaggtaggtagcagcttgcggttgcgggagggaagctgcgcgcgctaggctgccatggcggtggagaagacgctgcccggcgcgagtgcggggaggaccgtgctggtcacgggcggggcgggctacatcggtagccacgccgtgctgcagctcctcctcgcgggcttccgcgccgtcgtcatcgacaacctcaacaactcctccgagctggccgtccgccgcgtcgccgcgctcgcgggggaccactcccgcaacctctctttccacaagattgatctccgtgacaagggagcactggaaatggtttttgcttctacaagatttgaagctgtcattcacttcgctggattgaaagctgtgggtgaaagcgtacagaagccattactttattatgacaacaacgtcattggcacgataaatcttctagaagttatgtctgttcacggttgcaagaagttggtgttctcatcatcagctgcagtttatggatcacccaaaaactcaccctgcacagaaaattttcctcttactccaaacaatccatatggcaaaacaaagctcgttgttgaagatatttgccgggatatctaccgttcagatcctgaatggaagatcattttacttaggtacttcaatccagttggtgctcatcctagtggatatcttggcgaggacccacgaggaattcccaacaatcttatgccctatgttcagcaagttgcggttggtaggaggccagctctaacagttttaggaaatgactatgcaacaagagatgggactggggtccgagattacatccatgtggttgaccttgctgacggacatattgctgcattgcagaagctttttgagaactctagcatagggtgtgaagcgtacaaccttggaaccggaagaggtacatctgtgctggagattgttaaagcatttgagaaggcttctgggaagaaaatacctctgatttttggtgaaagacgcccaggtgatgcagagattctgttttcagagactactaaagcagagagggagcttaactggaaagcaaaatacggtattgaagagatgtgccgcgaccaatggaactgggccagcaagaacccttatggctatggatcacctgactctatcaagcagaatggtcaccaaacaaacggatccgctgactcctccaagcagaatggccaccgcacaaacggttcaactgactcacccaagcggaacggccaccatgcgtatgggtctgctgactcacccaagcgcaacgggcactgcgtttttggatcatcagacctcaagccgaatggtaatggccacctgcgctgagcagaactgtttggcctgtgagctccctgtacattcggttgcgatgtgagctccctgcacgttcggtcgaggtctatcgtgaacccactatccgagattgatgtggatcattgggttgacaggtcatacagtatagagccggtggcagaggaattcctgtttgctgtgggtaaagcttatcttctgctttcgtgttttttcttgcttctttcgattatggtgtaggaatgtggtcataatgtattagctgattatcctttccctgctaattggactttattacgcttcattaagtttggctgattactgtttaacggggaaaagttgcacctgtgtacgattatttatttgtacctgtaatatttatggagaactagcctcgccgcaaatagccctgatgaattcagctgcagtttattcccaaaaaaaaaaaaaaaaaaaaaaaaaaaaaaaaaaaaaaaaaaaaaaaaaaaaaaaaaaaaaaggggcccc

SEQ ID NO: 318 - protein, 423 aa, Zea mays; identical to SEQ ID NO: 292

SEQ ID NO: 319 - DNA, 1444 bp, Glycine max
acgtgtcacagaattctcgccttttccgaatatggcatcgcgcgtcagcattggcaatctcacttcctccgcgccgtatattaattcccctcattttcgctcacaacttaagctttccagcaactcctctttgcacaagccactcatgcgcgacaagactgtgctggtaaccggcggagccggttacatcggcacccacaccgttcttcagctcttgctcggaggttgcagaaccgtcgtcgtcgacaatctcgacaattcctccgaggtttctatccaccgagtcagggagcttgccggcgaatttgggaacaacctctcctttcacaaggtggacctacgggacagggatgcactagagcaaatttttgtttccacacaatttgatgctgtcatacactttgctggactgaaagcagtaggagaaagtgtgcaaaaacctttactatactataacaacaacttgactgggacaatcactctattggaagtcatggctgcccatggatgcaagaagctcgtgttctcttcttcagcaactgtatatggttggccaaaggaagttccatgcacagaagagttccctctgtcagcaatgaacccatatggacgaactaagcttatcattgaagaaatttgccgtgatgtccactgtgcagagccagattgtaaaataattttgttaagatacttcaacccagttggtgcacaccccagcggttatattggggaggatcctcgcggaattccaaacaatctcatgccatttgttcagcaagtagcagttggccgacggcctgcactgacagtttttggaaatgattataatacaagtgatggcactggggttcgggattacattcatgttgttgatttagcagatgggcacattgctgcattgcttaaactagatgaacctaatataggttgtgaggtttataacctgggaacaggaaagggaacatcagttttggagatggttagagcttttgaaatggcatctggaaagaaaattccacttgtgatggctggccgtagacctggtgatgctgaaattgtttatgcatcaacaaagaaagcggaaagagagcttaaatggaaggcaaaatatggcattgatgagatgtgccgtgatcaatggaattgggctagcaaaaacccttatggctatggagatcagggctccaccgattaaccacttagttttctctttgggttcttttctgaactcacccacaccgtagtccgtaggtcttgtgaatttagttttcccaaaagcttttctttctttagtgatcttaaggtgacaaagtacttgtattattactattcatagttacatagtaagtaagtagtggtttactatactgtaatttaaaggttctctaggttccttcttacaggttattgattattagattcggattctctcatgttccacatg

SEQ ID NO: 320 - protein, 387 aa, Glycine max
MASRVSIGNLTSSAPYINSPHFRSQLKLSSNSSLHKPLMRDKTVLVTGGAGYIGTHTVLQLLLGGCRTVVVDNLDNSSEVSIHRVRELAGEFGNNLSFHKVDLRDRDALEQIFVSTQFDAVIHFAGLKAVGESVQKPLLYYNNNLTGTITLLEVMAAHGCKKLVFSSSATVYGWPKEVPCTEEFPLSAMNPYGRTKLIIEEICRDVHCAEPDCKIILLRYFNPVGAHPSGYIGEDPRGIPNNLMPFVQQVAVGRRPALTVFGNDYNTSDGTGVRDYIHVVDLADGHIAALLKLDEPNIGCEVYNLGTGKGTSVLEMVRAFEMASGKKIPLVMAGRRPGDAEIVYASTKKAERELKWKAKYGIDEMCRDQWNWASKNPYGYGDQGSTD
